(19) United States
(12) Patent Application Publication
(10) Pub. No.: US 2024/0301377 A1
(43) Pub. Date: Sep. 12, 2024

(54) Polynucleotides, Compositions, and Methods for Genome Editing

(71) Applicant: Intellia Therapeutics, Inc., Cambridge, MA (US)

(72) Inventors: Sabin Mulepati, Somerville, MA (US); Lindsey Jean Stretz, Cambridge, MA (US)

(73) Assignee: Intellia Therapeutics, Inc., Cambridge, MA (US)

(21) Appl. No.: 18/652,180

(22) Filed: May 1, 2024

Related U.S. Application Data
(63) Continuation of application No. PCT/US2022/079124, filed on Nov. 2, 2022.
(60) Provisional application No. 63/352,158, filed on Jun. 14, 2022.
(60) Provisional application No. 63/275,425, filed on Nov. 3, 2021.

(51) Int. Cl. C12N 9/22; A61K 38/00; A61K 48/00; C12N 9/78; C12N 15/11; C12N 15/63

(52) U.S. Cl. CPC C12N 9/22; A61K 48/0016; C12N 9/78; C12N 15/111; C12N 15/63; A61K 38/00; C07K 2319/09; C12N 2310/20; C12N 2830/50; C12Y 305/04005

(57) ABSTRACT

Compositions and methods for gene editing are provided. In some embodiments, provided is a polynucleotide encoding an RNA-guided DNA binding agent such as N. meningitidis Cas9 that can provide one or more of improved editing efficiency, reduced immunogenicity, or other benefits.

[0001] This application is a continuation of International Application No. PCT/US2022/079124 filed Nov. 2, 2022, which claims the benefit of priority to U.S. Provisional Application No. 63/275,425 filed on Nov. 3, 2021, and U.S. Provisional Application No. 63/352,158 filed on Jun. 14, 2022, the contents all of which are incorporated by reference in their entirety.

[0002] The instant application contains a Sequence Listing which has been submitted electronically in XML format and is hereby incorporated by reference in its entirety. Said XML copy, created on Nov. 1, 2022, is named 01155-0049-00PCT_ST26 and is 11,070,539 bytes in size.

[0003] The present disclosure relates to polynucleotides, compositions, and methods for genome editing involving RNA-guided DNA binding agents such as CRISPR-Cas systems and subunits thereof.

[0004] RNA-guided DNA binding agents such as CRISPR-Cas systems can be used for targeted genome editing, including in eukaryotic cells and in vivo. Such editing has been shown to be capable of inactivating certain deleterious alleles or correcting certain deleterious point mutations. For example, Neisseria meningitidis Cas9 (NmeCas9) has an advantageously low off-target cleavage rate. RNA-guided DNA binding agents can be produced in situ by cells contacted with polynucleotides, such as mRNAs or expression constructs. Existing approaches, e.g., in certain cell types or organisms such as mammals, may, however, provide less robust expression than desired or may be undesirably immunogenic, e.g., may provoke an undesirable elevation in cytokine levels.

[0005] Thus, there is a need for polynucleotides, compositions, and methods for expression of polypeptides, such as NmeCas9. The present disclosure aims to provide compositions and methods for polypeptide expression that provide one or more benefits such as at least one of improved expression levels, increased activity of the encoded polypeptide, or reduced immunogenicity (e.g., reduced elevation in cytokines upon administration), or at least to provide the public with a useful choice. In some embodiments, a polynucleotide encoding an RNA-guided DNA binding agent (e.g., NmeCas9) is provided, wherein one or more of its coding sequence, codon usage, non-coding sequence (e.g., a UTR), or heterologous domain (e.g., NLS) differs from existing polynucleotides in a manner disclosed herein. It has been found that such features can provide benefits such as those described above. In some embodiments, the improved editing efficiency occurs in or is specific to an organ or cell type of a mammal, such as the liver or hepatocytes.

[0006] The following embodiments are provided by this disclosure.

[0007] In some embodiments, a polynucleotide is provided, the polynucleotide comprising an open reading frame (ORF), the ORF comprising: a nucleotide sequence encoding a C-terminal N. meningitidis (Nine) Cas9 polypeptide at least 90% identical to any one of SEQ ID NOs: 29, 32-41, 224-226, 231-233, 238-240, 245-247, 252-254, 259-261, 266-268, 273-275, 280-282, 287-289, 294-296, or 301-303, and 317-321, wherein the Nine Cas9 is an Nme2 Cas9, an Nme1 Cas9, or Nme3 Cas9; and a nucleotide sequence encoding a first nuclear localization signal (NLS).

[0008] In some embodiments, the ORF further comprises a nucleotide sequence encoding a second NLS. In some embodiments, the first and second NLS are independently selected from SEQ ID NO: 388 and 410-422. In some embodiments, the polynucleotide further comprises a poly-A sequence or a polyadenylation signal sequence.

In some embodiments, the ORF further comprises a nucleotide sequence encoding a linker sequence between the first NLS and the second NLS. In some embodiments, the ORF further comprises a nucleotide sequence encoding a linker spacer sequence between the Nine Cas9 coding sequence and the NLS proximal to the Nine Cas9 coding sequence. In some embodiments, the ORF Nine Cas9 has double stranded endonuclease activity. In some embodiments, the ORF Nine Cas9 has nickase activity. In some embodiments, the ORF the Nine Cas9 comprises a dCas9 DNA binding domain.

[0009] The following numbered embodiments provide additional support for and descriptions of the embodiments herein.

[0010] Embodiment 1 is a polynucleotide comprising an open reading frame (ORF), the ORF comprising: a nucleotide sequence encoding a C-terminal N. meningitidis (Nine) Cas9 polypeptide at least 90% identical to any one of SEQ ID NOs: 29, 32-41, 224-226, 231-233, 238-240, 245-247, 252-254, 259-261, 266-268, 273-275, 280-282, 287-289, 294-296, 301-303, or 316-321, wherein the Nine Cas9 is an Nme2 Cas9, an Nme1 Cas9, or Nme3 Cas9; and a nucleotide sequence encoding a first nuclear localization signal (NLS).

[0011] Embodiment 2 is a polynucleotide of Embodiment 1, wherein the ORF further comprises a nucleotide sequence encoding a second NLS.

[0012] Embodiment 3 is a polynucleotide of Embodiment 1, wherein the first and second NLS are independently selected from SEQ ID NO: 388 and 410-422.

[0013] Embodiment 4 is a polynucleotide of any one of Embodiments 1-3, wherein the polynucleotide further comprises a poly-A sequence or a polyadenylation signal sequence.

[0014] Embodiment 5 is a polynucleotide of Embodiment 4, wherein the poly-A sequence comprises non-adenine nucleotides.

[0015] Embodiment 6 is a polynucleotide of any one of Embodiments 4-5, wherein the poly-A sequence comprises 100-400 nucleotides.

[0016] Embodiment 7 is a polynucleotide of any one of Embodiments 4-6, wherein the poly-A sequence comprises a sequence of SEQ ID NO: 409.

[0017] Embodiment 8 is a polynucleotide of any one of Embodiments 1-7, wherein the ORF further comprises a nucleotide sequence encoding a linker sequence between the first NLS and the second NLS.

[0018] Embodiment 9 is a polynucleotide of any one of Embodiments 1-8, wherein the ORF further comprises a nucleotide sequence encoding a linker spacer sequence between the Nine Cas9 coding sequence and the NLS proximal to the Nine Cas9 coding sequence.

[0019] Embodiment 10 is a polynucleotide of any one of Embodiments 8-9, wherein the linker comprises at least 1, at least 2, at least 3, at least 4, at least 5, at least 6, at least 7, at least 8, at least 9, or at least 10 amino acids.

[0020] Embodiment 11 is a polynucleotide of any one of Embodiments 8-10, wherein the linker sequence comprises GGG or GGGS, optionally wherein the GGG or GGGS sequence is at the N-terminus of the spacer sequence.

[0021] Embodiment 12 is a polynucleotide of any one of Embodiments 8-11, wherein the linker sequence comprises a sequence of any one of SEQ ID NOs: 61-122.

[0022] Embodiment 13 is a polynucleotide of any one of Embodiments 1-12, wherein the ORF further comprises one or more additional heterologous functional domains.

[0023] Embodiment 14 is a polynucleotide of any one of Embodiments 1-13, wherein the Nine Cas9 has double stranded endonuclease activity.

[0024] Embodiment 15 is a polynucleotide of any one of Embodiments 1-14, wherein the Nine Cas9 has nickase activity.

[0025] Embodiment 16 is a polynucleotide of any one of Embodiments 1-14, wherein the Nine Cas9 comprises a dCas9 DNA binding domain.

[0026] Embodiment 17 is a polynucleotide of any one of Embodiments 1-16, wherein the NmeCas9 comprises an amino acid sequence with at least 91%, 92%, 93%, 94%, 95%, 96%, 97%, 98%, or 99% to any one of SEQ ID NOs: 1 and 4-13, 220, 227, 234, 241, 248, 255, 262, 269, 276, 283, 290, 297, or 310-315.

[0027] Embodiment 18 is a polynucleotide of any one of Embodiments 1-17 wherein the NmeCas9 comprises an amino acid sequence of SEQ ID NO: 1 and 4-13, 220, 227, 234, 241, 248, 255, 262, 269, 276, 283, 290, 297, or 310-315.

[0028] Embodiment 19 is a polynucleotide of any one of Embodiments 1-18, wherein the sequence encoding the NmeCas9 comprises a nucleotide sequence having at least 91%, 92%, 93%, 94%, 95%, 96%, 97%, 98%, or 99% identity to the nucleotide sequence of any one of SEQ ID NOs: 15, 18-27, 29, 32-41, 221-226, 228-233, 235-240, 242-247, 249-254, 256-261, 263-268, 270-275, 277-282, 284-289, 291-296, 298-303, 304-309, or 316-321.

[0029] Embodiment 20 is a polynucleotide of any one of Embodiments 1-19, wherein the sequence encoding the NmeCas9 comprises a nucleotide sequence of any one of SEQ ID NOs: 15, 18-27, 29, 32-41, 221-226, 228-233, 235-240, 242-247, 249-254, 256-261, 263-268, 270-275, 277-282, 284-289, 291-296, 298-303, 304-309, or 316-321.

[0030] Embodiment 21 is a polynucleotide comprising an open reading frame (ORF) encoding a polypeptide comprising: a cytidine deaminase, which is optionally an APOBEC3A deaminase; a nucleotide sequence encoding a C-terminal N. meningitidis (Nine) Cas9 nickase polypeptide at least 90% identical to any one of SEQ ID NOs: 1 and 4-13, 220, 227, 234, 241, 248, 255, 262, 269, 276, 283, 290, or 297, wherein the Nine Cas9 nickase is an Nme2 Cas9 nickase, an Nme1 Cas9 nickase, or an Nme3 Cas9 nickase; and a nucleotide sequence encoding a first nuclear localization signal (NLS); wherein the polypeptide does not comprise a uracil glycosylase inhibitor (UGI).

[0031] Embodiment 22 is a polynucleotide of Embodiment 21, wherein the ORF further comprises a nucleotide sequence encoding a second NLS.

[0032] Embodiment 23 is a polynucleotide of any one of Embodiments 21-22, wherein the deaminase is located N-terminal to an NLS in the polypeptide.

[0033] Embodiment 24 is a polynucleotide of any one of Embodiments 21-23, wherein the cytidine deaminase is located N-terminal to the first NLS and the second NLS in the polypeptide.

[0034] Embodiment 25 is a polynucleotide of any one of Embodiments 21-22, wherein the cytidine deaminase is located C-terminal to an NLS in the polypeptide.

[0035] Embodiment 26 is a polynucleotide of any one of Embodiments 23-25, wherein the cytidine deaminase is located C-terminal to the first NLS and the second NLS in the polypeptide.

[0036] Embodiment 27 is a polynucleotide of any one of Embodiments 21-26, wherein the ORF does not comprise a coding sequence for an NLS C-terminal to the ORF encoding the Nine Cas9.

[0037] Embodiment 28 is a polynucleotide of any one of Embodiments 21-26, wherein the ORF does not comprise a coding sequence C-terminal to the ORF encoding the Nine Cas9.

[0038] Embodiment 29 is a polynucleotide of any one of Embodiments 1-28, wherein the cytidine deaminase comprises an amino acid sequence with at least 87% identity to SEQ ID NOs: 151.

[0039] Embodiment 30 is a polynucleotide of any one of Embodiments 1-28, wherein the cytidine deaminase comprises an amino acid sequence with at least 80% identity to SEQ ID NOs: 152-216.

[0040] Embodiment 31 is a polynucleotide of any one of Embodiments 1-28, wherein the cytidine deaminase comprises an amino acid sequence with at least 80% identity to SEQ ID NO: 14.

[0041] Embodiment 32 is a polynucleotide of any one of Embodiments 1-31, the ORF comprises a nucleotide sequence at least 80% identical to SEQ ID NO: 42.

[0042] Embodiment 33 is a polynucleotide of any one of Embodiments 1-32, wherein the polynucleotide comprises a 5′ UTR with at least 90% identity to any one of SEQ ID NOs: 391-398.

[0043] Embodiment 34 is a polynucleotide of any one of Embodiments 1-33, wherein the polynucleotide comprises a 5′ UTR comprising any one of SEQ ID NOs: 391-398.

[0044] Embodiment 35 is a polynucleotide of any one of Embodiments 1-34, wherein the polynucleotide comprises a 3′ UTR with at least 90% identity to any one of SEQ ID NOs: 399-406.

[0045] Embodiment 36 is a polynucleotide of any one of Embodiments 1-35, wherein the polynucleotide comprises a 3′ UTR comprising any one of SEQ ID NOs: 399-306.

[0046] Embodiment 37 is a polynucleotide of any one of Embodiments 1-36, wherein the polynucleotide comprises a 5′ UTR and a 3′ UTR from the same source.

[0047] Embodiment 38 is a polynucleotide of any one of Embodiments 1-37, wherein the polynucleotide comprises a 5′ cap, optionally wherein the 5′ cap is Cap0, Cap1, or Cap2.

[0048] Embodiment 39 is a polynucleotide of any one of Embodiments 1-38, wherein at least 75%, 80%, 85%, 90%, 95%, 98%, 99%, or 100% of the codons of the ORF are minimal adenine codons or minimal uridine codons.

[0049] Embodiment 40 is a polynucleotide of any one of Embodiments 1-39, wherein the ORF comprises or consists of codons that increase translation of the mRNA in a mammal.

[0050] Embodiment 41 is a polynucleotide of any one of Embodiments 1-40, wherein the ORF comprises or consists of codons that increase translation of the mRNA in a human.

[0051] Embodiment 42 is a polynucleotide of any one of Embodiments 1-41, wherein the polynucleotide is an mRNA.

[0052] Embodiment 43 is a polynucleotide of Embodiment 42, wherein the ORF comprises a sequence having at least 90%, 95%, 98% or 100% identity to any one of SEQ ID NO: 29, 32-41, 224-226, 231-233, 238-240, 245-247, 252-254, 259-261, 266-268, 273-275, 280-282, 287-289, 294-296, 301-303, or 316-321.

[0053] Embodiment 44 is a polynucleotide of any one of Embodiments 42-43, wherein at least 10% of the uridine in the mRNA is substituted with a modified uridine.

[0054] Embodiment 45 is a polynucleotide of any one of Embodiments 42-43, wherein less than 10% of the uridine in the mRNA is substituted with a modified uridine.

[0055] Embodiment 46 is a polynucleotide of Embodiment 45, wherein the modified uridine is one or more of N1-methyl-pseudouridine, pseudouridine, 5-methoxyuridine, or 5-iodouridine.

[0056] Embodiment 47 is a polynucleotide of Embodiment 45, wherein the modified uridine is one or both of N1-methyl-pseudouridine or 5-methoxyuridine.

[0057] Embodiment 48 is a polynucleotide of any one of Embodiments 45-47, wherein the modified uridine is N1-methyl-pseudouridine.

[0058] Embodiment 49 is a polynucleotide of any one of Embodiments 45-47, wherein the modified uridine is 5-methoxyuridine.

[0059] Embodiment 50 is a polynucleotide of any one of Embodiments 44, and 46-49, wherein 15% to 45% of the uridine is substituted with the modified uridine.

[0060] Embodiment 51 is a polynucleotide of Embodiment 50, wherein at least 20% or at least 30% of the uridine is substituted with the modified uridine.

[0061] Embodiment 52 is a polynucleotide of Embodiment 51, wherein at least 80% or at least 90% of the uridine is substituted with the modified uridine.

[0062] Embodiment 53 is a polynucleotide of Embodiment 52, wherein 100% of the uridine is substituted with the modified uridine.

[0063] Embodiment 54 is a polynucleotide of Embodiment 42, wherein less than 10% of the nucleotides in the mRNA is substituted with a modified nucleotide.

[0064] Embodiment 55 is a composition comprising the polynucleotide according to any one of Embodiments 1-54, and at least one guide RNA (gRNA).

[0065] Embodiment 56 is a composition comprising a first polynucleotide comprising a first open reading frame (ORF) encoding a polypeptide comprising a cytidine deaminase, optionally an APOBEC3A deaminase, and a NmeCas9 nickase, and a second polynucleotide comprising a second open reading frame encoding a uracil glycosylase inhibitor (UGI), wherein the second polynucleotide is different from the first polynucleotide, and optionally further comprising a guide RNA (gRNA).

[0066] Embodiment 57 is a composition of Embodiment 55 or 56, wherein the gRNA is a single guide RNA.

[0067] Embodiment 58 is a composition of Embodiment 55 or 56, wherein the gRNA is a dual guide RNA.

[0068] Embodiment 59 is a composition comprising the polynucleotide according to any one of Embodiments 1-57, further comprising a single guide RNA, wherein the single guide RNA comprises a guide region and a conserved region, wherein the conserved region comprising one or more of:
[0069] (a) a shortened repeat/anti-repeat region, wherein the shortened repeat/anti-repeat region lacks 2-24 nucleotides, wherein
   [0070] (i) one or more of nucleotides 37-48 and 53-64 is deleted and optionally one or more of nucleotides 37-64 is substituted relative to SEQ ID NO: 500; and
   [0071] (ii) nucleotide 36 is linked to nucleotide 65 by at least 2 nucleotides; or
[0072] (b) a shortened hairpin 1 region, wherein the shortened hairpin 1 lacks 2-10, optionally 2-8 nucleotides, wherein
   [0073] (i) one or more of nucleotides 82-86 and 91-95 is deleted and optionally one or more of positions 82-96 is substituted relative to SEQ ID NO: 500; and
   [0074] (ii) nucleotide 81 is linked to nucleotide 96 by at least 4 nucleotides; or
[0075] (c) a shortened hairpin 2 region, wherein the shortened hairpin 2 lacks 2-18, optionally 2-16 nucleotides, wherein
   [0076] (i) one or more of nucleotides 113-121 and 126-134 is deleted and optionally one or more of nucleotides 113-134 is substituted relative to SEQ ID NO: 500; and
   [0077] (ii) nucleotide 112 is linked to nucleotide 135 by at least 4 nucleotides;
[0078] wherein one or both nucleotides 144-145 are optionally deleted relative to SEQ ID NO: 500;
[0079] wherein at least 10 nucleotides are modified nucleotides.

[0080] Embodiment 60 is a composition comprising the polynucleotide according to any one of Embodiments 1-57, further comprising a single guide RNA, wherein the single guide RNA comprises a guide region and a conserved region, wherein the conserved region comprising one or more of:
[0081] (a) a shortened repeat/anti-repeat region, wherein the shortened repeat/anti-repeat region lacks 2-24 nucleotides, wherein
   [0082] (i) one or more of nucleotides 37-64 is deleted and optionally substituted relative to SEQ ID NO: 500; and
   [0083] (ii) nucleotide 36 is linked to nucleotide 65 by (i) a first internal linker that alone or in combination with nucleotides substitutes for 4 nucleotides, or (ii) at least 4 nucleotides; or
[0084] (b) a shortened hairpin 1 region, wherein the shortened hairpin 1 lacks 2-10, optionally 2-8 nucleotides, wherein
   [0085] (i) one or more of nucleotides 82-95 is deleted and optionally substituted relative to SEQ ID NO: 500; and
   [0086] (ii) nucleotide 81 is linked to nucleotide 96 by (i) a second internal linker that alone or in combination with nucleotides substitutes for 4 nucleotides, or (ii) at least 4 nucleotides; or
[0087] (c) a shortened hairpin 2 region, wherein the shortened hairpin 2 lacks 2-18, optionally 2-16 nucleotides, wherein
   [0088] (i) one or more of nucleotides 113-134 is deleted and optionally substituted relative to SEQ ID NO: 500; and
   [0089] (ii) nucleotide 112 is linked to nucleotide 135 by (i) a third internal linker that alone or in combination with nucleotides substitutes for 4 nucleotides, or (ii) at least 4 nucleotides;
[0090] wherein one or both nucleotides 144-145 are optionally deleted as compared to SEQ ID NO: 500;
[0091] wherein the gRNA comprises at least one of the first internal linker, the second internal linker, and the third internal linker.

[0092] Embodiment 61 is a polypeptide encoded by the polynucleotide of any one of Embodiments 1-60.

[0093] Embodiment 62 is a vector comprising the polynucleotide of any one of Embodiments 1-60.

[0094] Embodiment 63 is an expression construct comprising a promoter operably linked to a sequence encoding the polynucleotide of any one of Embodiments 1-60.

[0095] Embodiment 64 is an expression construct of Embodiment 63, wherein the promoter is an RNA polymerase promoter, optionally a bacterial RNA polymerase promoter.

[0096] Embodiment 65 is an expression construct of Embodiment 63 or 64, further comprising poly-A tail sequence or a polyadenylation signal sequence.

[0097] Embodiment 66 is an expression construct of Embodiment 65, wherein the poly-A tail sequence is an encoded poly-A tail sequence.

[0098] Embodiment 67 is a plasmid comprising the expression construct of any one of Embodiments 63-66.

[0099] Embodiment 68 is a host cell comprising the vector of Embodiment 62, the expression construct of any one of Embodiments 63-66, or the plasmid of Embodiment 67.

[0100] Embodiment 69 is a pharmaceutical composition comprising the polynucleotide, composition, or polypeptide of any of Embodiments 1-61 and a pharmaceutically acceptable carrier.

[0101] Embodiment 70 is a kit comprising the polynucleotide, composition, or polypeptide of any of Embodiments 1-61.

[0102] Embodiment 71 is use of the polynucleotide, composition, or polypeptide of any one of Embodiments 1-61 for modifying a target gene in a cell.

[0103] Embodiment 72 is use of the polynucleotide, composition, or polypeptide of any one of Embodiments 1-61 for the manufacture of a medicament for modifying a target gene in a cell.

[0104] Embodiment 73 is a polynucleotide or composition of any one of Embodiments 1-60, wherein the polynucleotide or composition is formulated as a lipid nucleic acid assembly composition, optionally a lipid nanoparticle.

[0105] Embodiment 74 is a method of modifying a target gene comprising delivering to a cell the polynucleotide, polypeptide, or composition of any one of Embodiments 1-61.

[0106] Embodiment 75 is a method of modifying a target gene, comprising delivering to the cell one or more lipid nucleic acid assembly compositions, optionally lipid nanoparticles, comprising the polynucleotide according to any one of Embodiments 1-60, and one or more guide RNAs.

[0107] Embodiment 76 is a method of any one of Embodiments 74-75, wherein at least one lipid nucleic acid assembly composition comprises lipid nanoparticle (LNPs), optionally wherein all lipid nucleic acid assembly compositions comprise LNPs.

[0108] Embodiment 77 is a method of any one of Embodiments 74-75, wherein at least one lipid nucleic acid assembly composition is a lipoplex composition.

[0109] Embodiment 78 is a composition or method of any one of Embodiments 75-77, wherein the lipid nucleic acid assembly composition comprises an ionizable lipid.

[0110] Embodiment 79 is a method of producing a polynucleotide of any one of Embodiments 1-54, comprising contacting the expression construct of Embodiments 63-66 with an RNA polymerase and NTPs that comprise at least one modified nucleotide.

[0111] Embodiment 80 is a method of Embodiment 79, wherein NTPs comprise one modified nucleotide.

[0112] Embodiment 81 is a method of Embodiment 79 or 80 wherein the modified nucleotide comprises a modified uridine.

[0113] Embodiment 82 is a method of Embodiment 81, wherein at least 80% or at least 90% or 100% of the uridine positions are modified uridines.

[0114] Embodiment 83 is a method of Embodiment 81 or 82, wherein the modified uridine comprises or is a substituted uridine, pseudouridine, or a substituted pseudouridine, optionally N1-methyl-psuedouridine.

[0115] Embodiment 84 is a method of any one of Embodiments 79-83, wherein the expression construct comprises an encoded poly-A tail sequence.

### BRIEF DESCRIPTION OF THE DRAWINGS

[0116] FIG. 1 shows mean percent editing at the TTR locus in PMH with increasing doses of Nme2Cas9 mRNA and chemically modified sgRNA.

[0117] FIG. 2A shows mean percent editing at the TTR locus in PMH using varying ratios of sgRNA and Nme2Cas9 mRNA.

[0118] FIG. 2B shows mean percent editing at the TTR locus in PMH using varying ratios pgRNA and Nme2Cas9 mRNA.

[0119] FIG. 3 shows mean percent editing at the TTR locus in PMH for pgRNAs with Nme2Cas9 mRNA.

[0120] FIG. 4 shows mean editing percentage in at the PCSK9 locus in PMH.

[0121] FIG. 5A shows mean editing results at the VEGFA locus in HEK cells treated with mRNA C

[0122] FIG. 5B shows mean editing results at the VEGFA locus in HEK cells treated with mRNA I

[0123] FIG. 5C shows mean editing results at the VEGFA locus in HEK cells treated with mRNA J

[0124] FIG. 5D shows mean editing results at the VEGFA locus in PHH cells treated with mRNA C

[0125] FIG. 5E shows mean editing results at the VEGFA locus in PHH cells treated with mRNA I

[0126] FIG. 5F shows mean editing results at the VEGFA locus in PHH cells treated with mRNA J

[0127] FIG. 6 shows mean percent editing at the mouse TTR locus in PMH cells treated with NmeCas9 constructs designed with 1 or 2 nuclear localization sequences.

[0128] FIG. 7 shows mean percent editing at the mouse TTR locus in PMH cells treated with pgRNA and various Nme2Cas9 mRNAs.

[0129] FIG. 8 shows fold change in Nme2Cas9 protein expression compared to SpyCas9 protein expression in PMH, PRH, PCH and PHH cells.

[0130] FIGS. 9A-9F show fold change in Nme2Cas9 protein expression compared to SpyCas9 protein expression in T cells from 2 donors assayed at 24 hours, 48 hours and 72 hours after treatment.

[0131] FIG. 10 shows mean percent editing at the TTR locus in mouse liver treated with sgRNA and Nme2Cas9.

[0132] FIG. 11A shows mean percent editing at the TTR locus in mouse liver following treatment with pgRNA and Nme2Cas9.

[0133] FIG. 11B shows mean serum TTR protein following treatment with pgRNA and Nme2Cas9.

[0134] FIG. 11C shows mean percent TTR knockdown following treatment with pgRNA and Nme2Cas9.

[0135] FIG. 11D shows mean percent editing at the TTR locus in mouse liver following treatment with pgRNA and various Nme2Cas9.

[0136] FIG. 11E shows serum TTR protein knockdown following treatment with pgRNA and various Nme2Cas9.

[0137] FIG. 12 shows mean percent editing in mouse liver following treatment with various Nme2Cas9 constructs.

[0138] FIG. 13 shows mean percent editing in mouse liver following treatment with pgRNA and various Nme2Cas9

[0139] FIG. 14 shows mean percent editing in mouse liver following treatment with various base editors.

[0140] FIG. 15 shows an exemplary schematic of Nme2 sgRNA in a possible secondary structure, including the repeat/anti-repeat region and the hairpin region which includes hairpin 1 and hairpin 2 regions and further indicates the guide region (or targeting region) (denoted with a gray fill with dashed outline), bases not amenable to single or pairwise deletion (denoted with a gray fill with solid outline), bases amenable to single or pairwise deletion (open circles).

[0141] FIG. 16 shows the mean percent CD3 negative T cells following TRAC editing with Nme1Cas9.

[0142] FIG. 17 shows the mean percent CD3 negative T cells following TRAC editing with Nme3Cas9.

[0143] FIG. 18 shows the expression of Nme-HiBiT constructs in T cells at 24 hours.

[0144] FIG. 19 shows the CD3-negative cell population as a function of NmeCas9 mRNA amount.

[0145] FIG. 20 shows the dose response curve for select gRNAs in PCH.

[0146] FIG. 21 shows the dose response curve for LNP dilution series in PCH.

[0147] FIG. 22 shows serum TTR levels in mice.

[0148] FIG. 23 shows percent editing at the TTR locus in mouse liver samples.

[0149] FIG. 24 shows the dose response curve for select gRNAs in PMH.

[0150] FIG. 25 shows the dose response curve for select gRNAs in PMH.

[0151] FIG. 26 shows mean percent editing at PCSK9 locus in PMH with modified sgRNAs.

[0152] FIG. 27 shows mean percent editing in PMH of several Nme2Cas9 mRNAs with a modified sgRNA.

[0153] FIG. 28 shows the percent editing at the TTR locus in primary mouse hepatocytes.

[0154] FIG. 29 shows serum TTR levels in mice.

[0155] FIG. 30 shows percent editing at the TTR locus in mouse liver samples.

[0156] FIG. 31 shows serum TTR measurements following treatment in mice.

[0157] FIG. 32 shows percent editing at the TTR locus in mouse liver samples.

[0158] FIG. 33 shows an exemplary sgRNA (G021536; SEQ ID NO: 139) in a possible secondary structure. The methylation is shown in bold; phosphorothioate linkages are indicated by ‘*’. Watson-Crick base pairing is indicated by a ‘−’ between nucleotides in duplex portions. Non-Watson-Crick base pairing is indicated by a ‘•’ between nucleotides in duplex portions.

[0159] FIG. 34 shows an exemplary sgRNA (G032572; SEQ ID NO: 528) in a possible secondary structure. The unmodified nucleotides are shown in bold and methylation is shown in light fonts; phosphorothioate linkages are indicated by ‘*’. Watson-Crick base pairing is indicated by a ‘−’ between nucleotides in duplex portions. Non-Watson-Crick base pairing is indicated by a ‘•’ between nucleotides in duplex portions.

[0160] FIG. 35 shows an exemplary sgRNA (G031771; SEQ ID NO: 529) in a possible secondary structure. The unmodified nucleotides are shown in bold and methylation is shown in light fonts; phosphorothioate linkages are indicated by ‘*’. Watson-Crick base pairing is indicated by a ‘−’ between nucleotides in duplex portions. Non-Watson-Crick base pairing is indicated by a ‘•’ between nucleotides in duplex portions.

BRIEF DESCRIPTION OF DISCLOSED SEQUENCES

| SEQ ID NO | Description |
|---|---|
| 1 | Exemplary Amino acid sequence for Nme2Cas9 |
| 2 | Exemplary Amino acid sequence for SpyCas9 base editor |
| 3 | Exemplary Amino acid sequence for UGI |
| 4-8 | Exemplary Amino acid sequence for Nme2Cas9 |
| 9 | Exemplary Amino acid sequence for Nme2Cas9 with HiBiT tag |
| 10 | Exemplary Amino acid sequence for Nme2Cas9 |
| 11 | Exemplary Amino acid sequence for Nme2Cas9 |
| 12 | Exemplary Amino acid sequence for Nme2Cas9 with HiBiT tag |
| 13 | Exemplary Amino acid sequence for Nme2Cas9 |
| 14 | Exemplary Amino acid sequence for Nme2Cas9 base editor |
| 15 | Exemplary mRNA encoding Nme2Cas9 |
| 16 | Exemplary mRNA encoding SpyCas9 base editor |
| 17 | Exemplary mRNA encoding UGI |
| 18-22 | Exemplary mRNA encoding Nme2Cas9 |
| 23 | Exemplary encoding Nme2Cas9 with HiBiT tag |
| 24 | Exemplary mRNA encoding Nme2Cas9 |
| 25 | Exemplary mRNA encoding Nme2Cas9 |
| 26 | Exemplary encoding Nme2Cas9 with HiBiT tag |
| 27 | Exemplary mRNA encoding Nme2Cas9 |
| 28 | Exemplary mRNA encoding Nme2Cas9 base editor |
| 29 | Open reading frame for Nme2Cas9 |
| 30 | Open reading frame for SpyCas9 base editor |
| 31 | Open reading frame for UGI |
| 32-36 | Open reading frame for Nme2Cas9 |
| 37 | Open reading frame for Nme2Cas9 with HiBiT tag |
| 38 | Open reading frame sequences for Nme2Cas9 |
| 39 | Open reading frame sequences for Nme2Cas9 |
| 40 | Open reading frame for Nme2Cas9 with HiBiT tag |
| 41 | Open reading frame sequences for Nme2Cas9 |
| 42 | Open reading frame for Nme2Cas9 base editor |
| 43-47 | ORF encoding Sp. Cas9 |
| 48 | amino acid sequence for Sp. Cas9 |
| 49 | Open reading frame for Cas9 with HiBiT tag |
| 50 | Amino acid sequence for Cas9 with HiBiT tag |
| 51-57 | Not Used |
| 58-122 | Exemplary amino acid sequences for peptide linker |
| 123-129 | Not Used |
| 130-150 | Exemplary guide RNA sequences |
| 151-216 | Exemplary amino acid sequences for cytidine deaminases |
| 217-219 | Not Used |
| 220 | Exemplary amino acid sequence of Nme1Cas9 cleavase |
| 221-223 | Exemplary coding sequences encoding Nme1Cas9 cleavase |
| 224-226 | Exemplary open reading frame for Nme1Cas9 cleavase |
| 227 | Exemplary amino acid sequence of Nme1Cas9 dCas9 |
| 228-230 | Exemplary coding sequence encoding Nme1Cas9 dCas9 |
| 231-233 | Exemplary open reading frame for Nme1Cas9 dCas9 |
| 234 | Exemplary amino acid sequence of Nme1Cas9 RuvC nickase |
| 235-237 | Exemplary coding sequence encoding Nme1Cas9 RuvC nickase |
| 238-240 | Exemplary open reading frame for Nme1Cas9 RuvC nickase |
| 241 | Exemplary amino acid sequence of Nme1Cas9 HNH nickase |
| 242-244 | Exemplary coding sequence encoding Nme1Cas9 HNH nickase |
| 245-247 | Exemplary open reading frame for Nme1Cas9 HNH nickase |
| 248 | Exemplary amino acid sequence of Nme2Cas9 cleavase |
| 249-251 | Exemplary coding sequence encoding Nme2Cas9 cleavase |
| 252-254 | Exemplary open reading frame for Nme2Cas9 cleavase |
| 255 | Exemplary amino acid sequence of Nme2Cas9 dCas9 |
| 256-258 | Exemplary coding sequence encoding Nme2Cas9 dCas9 |
| 259-261 | Exemplary open reading frame for Nme2Cas9 dCas9 |
| 262 | Exemplary amino acid sequence of Nme2Cas9 RuvC nickase |
| 263-265 | Exemplary coding sequence encoding Nme2Cas9 RuvC nickase |
| 266-268 | Exemplary open reading frame for Nme2Cas9 RuvC nickase |
| 269 | Exemplary amino acid sequence of Nme2Cas9 HNH nickase |
| 270-272 | Exemplary coding sequence encoding Nme2Cas9 HNH nickase |
| 273-275 | Exemplary open reading frame for Nme2Cas9 HNH nickase |
| 276 | Exemplary amino acid sequence of Nme3Cas9 cleavase |
| 277-279 | Exemplary coding sequence encoding Nme3Cas9 cleavase |
| 280-282 | Exemplary open reading frame for Nme3Cas9 cleavase |
| 283 | Exemplary amino acid sequence of Nme3Cas9 dCas9 |
| 284-286 | Exemplary coding sequence encoding Nme3Cas9 dCas9 |
| 287-289 | Exemplary open reading frame for Nme3Cas9 dCas9 |
| 290 | Exemplary amino acid sequence of Nme3Cas9 RuvC nickase |
| 291-293 | Exemplary coding sequence encoding Nme3Cas9 RuvC nickase |
| 294-296 | Exemplary open reading frame for Nme3Cas9 RuvC nickase |
| 297 | Exemplary amino acid sequence of Nme3Cas9 HNH nickase |
| 298-300 | Exemplary coding sequence encoding Nme3Cas9 HNH nickase |
| 301-303 | Exemplary open reading frame for Nme3Cas9 HNH nickase |
| 304 | Exemplary coding sequence encoding Nme2Cas9 (mRNA AA) |
| 305 | Exemplary coding sequence encoding Nme1Cas9 (mRNA AB) |
| 306 | Exemplary coding sequence encoding Nme2Cas9 with HiBiT tag (mRNA V) |
| 307 | Exemplary coding sequence encoding Nme1Cas9 with HiBiT tag (mRNA X) |
| 308 | Exemplary coding sequence encoding Nme1Cas9 with HiBiT tag (mRNA Y) |
| 309 | Exemplary coding sequence encoding Nme3Cas9 with HiBiT tag (mRNA Z) |
| 310 | Exemplary amino acid sequence for Nme2Cas9 (mRNA AA amino acid) |
| 311 | Exemplary amino acid sequence for Nme1Cas9 (mRNA AB amino acid) |
| 312 | Exemplary amino acid sequence for Nme2Cas9 with HiBiT tag (mRNA V amino |
| | acid) |
| 313 | Exemplary amino acid sequence for Nme1Cas9 with HiBiT tag (mRNA X amino |
| | acid) |
| 314 | Exemplary amino acid sequence for Nme1Cas9 with HiBiT tag (mRNA Y amino |
| | acid) |
| 315 | Exemplary amino acid sequence for Nme3Cas9 with HiBiT tag (mRNA Z amino |
| | acid) |
| 316 | Exemplary open reading frame for Nme2Cas9 (mRNA AA ORF) |
| 317 | Exemplary open reading frame for Nme1Cas9 (mRNA AB ORF) |
| 318 | Exemplary open reading frame for Nme2Cas9 with HiBiT tag (mRNA V ORF) |
| 319 | Exemplary open reading frame for Nme1Cas9 with HiBiT tag (mRNA X ORF) |
| 320 | Exemplary open reading frame for Nme1Cas9 with HiBiT tag (mRNA Y ORF) |
| 321 | Exemplary open reading frame for Nme3Cas9 with HiBiT tag (mRNA Z ORF) |
| 322-350 | Not used |
| 351-366 | Exemplary guide RNA sequences |
| 367-382 | Not used |
| 383 | SV40 NLS |
| 384 | SV40 NLS |
| 385 | bipartite NLS |
| 386 | c-myc like NLS |
| 387 | Nucleic acid sequence for SV40 NLS |
| 388 | Amino acid sequence for SV40 NLS |
| 389 | U6 promoter |
| 390 | CMV promoter |
| 391 | Exemplary 5′ UTR |
| 392 | Exemplary 5′ UTR |
| 393 | Exemplary 5′ UTR |
| 394 | Exemplary 5′ UTR |
| 395 | Exemplary 5′ UTR |
| 396 | Exemplary 5′ UTR |
| 397 | Exemplary 5′ UTR |
| 398 | Exemplary 5′ UTR |
| 399 | Exemplary 3′ UTR |
| 400 | Exemplary 3′ UTR |
| 401 | Exemplary 3′ UTR |
| 402 | Exemplary 3′ UTR |
| 403 | Exemplary 3′ UTR |
| 404 | Exemplary 3′ UTR |
| 405 | Exemplary 3′ UTR |
| 406 | Exemplary 3′ UTR |
| 407 | Exemplary Kozak sequence |
| 408 | Exemplary Kozak sequence |
| 409 | Exemplary poly-A sequence |
| 410 | Exemplary NLS 1 |
| 411 | Exemplary NLS 2 |
| 412 | Exemplary NLS 3 |
| 413 | Exemplary NLS 4 |
| 414 | Exemplary NLS 5 |
| 415 | Exemplary NLS 6 |
| 416 | Exemplary NLS 7 |
| 417 | Exemplary NLS 8 |
| 418 | Exemplary NLS 9 |
| 419 | Exemplary NLS 10 |
| 420 | Exemplary NLS 11 |
| 421 | Alternative SV40 NLS |
| 422 | Nucleoplasmin NLS |
| 423 | Exemplary coding sequence for SV40 NLS |
| 424 | Exemplary coding sequence for NLS1 |
| 425 | Exemplary coding sequence for NLS2 |
| 426 | Exemplary coding sequence for NLS3 |
| 427 | Exemplary coding sequence for NLS4 |
| 428 | Exemplary coding sequence for NLS5 |
| 429 | Exemplary coding sequence for NLS6 |
| 430 | Exemplary coding sequence for NLS7 |
| 431 | Exemplary coding sequence for NLS8 |
| 432 | Exemplary coding sequence for NLS9 |
| 433 | Exemplary coding sequence for NLS10 |
| 434 | Exemplary coding sequence for NLS11 |
| 435 | Exemplary coding sequence for alternate SV40 NLS |
| 436-458 | Exemplary NmeCas9 guide RNA sequences |
| 459-499 | Not Used |
| 500 | Wild-type NmeCas9 guide RNA |
| 501 | Shortened/unmodified NmeCas9 guide RNA |
| 502 | Shortened/unmodified NmeCas9 guide RNA |
| 503 | Shortened/unmodified NmeCas9 guide RNA |
| 504 | Mod-N77 conserved portion only |
| 505 | Mod-N78 conserved portion only |
| 506 | Shortened/unmodified NmeCas9 guide RNA comprising internal linkers |
| 507 | Shortened/modified NmeCas9 guide RNA comprising internal linkers |
| 508 | Shortened/modified NmeCas9 guide RNA |
| 509-535 | Exemplary sgRNAs |

[0162] Transcript sequences may generally include GGG as the first three nucleotides for use with ARCA or AGG as the first three nucleotides for use with CleanCap™. Accordingly, the first three nucleotides can be modified for use with other capping approaches, such as Vaccinia capping enzyme. Promoters and poly-A sequences are not included in the transcript sequences. A promoter such as a U6 promoter (SEQ ID NO: 389) or a CMV Promotor (SEQ ID NO: 390) and a poly-A sequence such as SEQ ID NO: 409 can be appended to the disclosed transcript sequences at the 5′ and 3′ ends, respectively. Most nucleotide sequences are provided as DNA but can be readily converted to RNA by changing Ts to Us.

### DETAILED DESCRIPTION OF CERTAIN EMBODIMENTS

[0163] Reference will now be made in detail to certain embodiments of the invention, examples of which are illustrated in the accompanying drawings. While the invention will be described in conjunction with the illustrated embodiments, it will be understood that they are not intended to limit the invention to those embodiments. On the contrary, the invention is intended to cover all alternatives, modifications, and equivalents, which may be included within the invention as defined by the appended claims.

[0164] Before describing the present teachings in detail, it is to be understood that the disclosure is not limited to specific compositions or process steps, as such may vary. It should be noted that, as used in this specification and the appended claims, the singular form “a”, “an” and “the” include plural references unless the context clearly dictates otherwise. Thus, for example, reference to “a conjugate” includes a plurality of conjugates and reference to “a cell” includes a plurality of cells and the like.

[0165] Numeric ranges are inclusive of the numbers defining the range. Measured and measurable values are understood to be approximate, taking into account significant digits and the error associated with the measurement. Accordingly, unless indicated to the contrary, the numerical parameters set forth in the following specification and attached claims are approximations that may vary depending upon the desired properties sought to be obtained. At the very least, and not as an attempt to limit the application of the doctrine of equivalents to the scope of the claims, each numerical parameter should at least be construed in light of the number of reported significant digits and by applying ordinary rounding techniques.

[0166] The term “about” is used herein to mean within the typical ranges of tolerances in the art. For example, “about” can be understood as about 2 standard deviations from the mean. In certain embodiments, about means +10%. In certain embodiments, about means +5%, +2%, or +1%. When about is present before a series of numbers or a range, it is understood that “about” can modify each of the numbers in the series or range. At the very least, and not as an attempt to limit the application of the doctrine of equivalents to the scope of the claims, each numerical parameter should at least be construed in light of the number of reported significant digits and by applying ordinary rounding techniques.

[0167] The use of “comprise”, “comprises”, “comprising”, “contain”, “contains”, “containing”, “include”, “includes”, and “including” are not intended to be limiting. It is to be understood that both the foregoing general description and detailed description are exemplary and explanatory only and are not restrictive of the teachings.

[0168] The term “at least” prior to a number or series of numbers is understood to include the number adjacent to the term “at least”, and all subsequent numbers or integers that could logically be included, as clear from context. For example, the number of nucleotides in a nucleic acid molecule must be an integer. For example, “at least 17 nucleotides of a 20 nucleotide nucleic acid molecule” means that 17, 18, 19, or 20 nucleotides have the indicated property. When at least is present before a series of numbers or a range, it is understood that “at least” can modify each of the numbers in the series or range.

[0169] As used herein, “no more than” or “less than” is understood as the value adjacent to the phrase and logical lower values or integers, as logical from context, to zero. For example, a duplex region of “no more than 2 nucleotide base pairs” has 2, 1, or 0 nucleotide base pairs. When “no more than” or “less than” is present before a series of numbers or a range, it is understood that each of the numbers in the series or range is modified.

[0170] As used herein, ranges include both the upper and lower limits.

[0171] As used herein, it is understood that when the maximum amount of a value is represented by 100% (e.g., 100% inhibition) that the value is interpreted in light of the method of detection. For example, 100% inhibition, and the like, is understood as inhibition to a level below the level of detection of the assay.

[0172] Unless specifically noted in the above specification, embodiments in the specification that recite “comprising” various components are also contemplated as “consisting of” or “consisting essentially of” the recited components; embodiments in the specification that recite “consisting of” various components are also contemplated as “comprising” or “consisting essentially of” the recited components; and embodiments in the specification that recite “consisting essentially of” various components are also contemplated as “consisting of” or “comprising” the recited components (this interchangeability does not apply to the use of these terms in the claims).

[0173] The section headings used herein are for organizational purposes only and are not to be construed as limiting the desired subject matter in any way. In the event that any literature incorporated by reference contradicts the express content of this specification, including but not limited to a definition, the express content of this specification controls. While the present teachings are described in conjunction with various embodiments, it is not intended that the present teachings be limited to such embodiments. On the contrary, the present teachings encompass various alternatives, modifications, and equivalents, as will be appreciated by those of skill in the art.

### I. Definitions

[0174] Unless stated otherwise, the following terms and phrases as used herein are intended to have the following meanings:

[0175] The term “or combinations thereof” as used herein refers to all permutations and combinations of the listed terms preceding the term. For example, “A, B, C, or combinations thereof” is intended to include at least one of: A, B, C, AB, AC, BC, or ABC, and if order is important in a particular context, also BA, CA, CB, ACB, CBA, BCA, BAC, or CAB. Continuing with this example, expressly included are combinations that contain repeats of one or more item or term, such as BB, AAA, AAB, BBC, AAABC, CBBA, BABB, and so forth. The skilled artisan will understand that typically there is no limit on the number of items or terms in any combination, unless otherwise apparent from the context.

[0176] As used herein, the term “kit” refers to a packaged set of related components, such as one or more polynucleotides or compositions and one or more related materials such as delivery devices (e.g., syringes), solvents, solutions, buffers, instructions, or desiccants.

[0177] “Or” is used in the inclusive sense, i.e., equivalent to “and/or,” unless the context requires otherwise.

[0178] “Polynucleotide” and “nucleic acid” are used herein to refer to a multimeric compound comprising nucleosides or nucleoside analogs which have nitrogenous heterocyclic bases or base analogs linked together along a backbone, including conventional RNA, DNA, mixed RNA-DNA, and polymers that are analogs thereof. A nucleic acid “backbone” can be made up of a variety of linkages, including one or more of sugar-phosphodiester linkages, peptide-nucleic acid bonds (“peptide nucleic acids” or PNA; PCT No. WO 95/32305), phosphorothioate linkages, methylphosphonate linkages, or combinations thereof. Sugar moieties of a nucleic acid can be ribose, deoxyribose, or similar compounds with substitutions, e.g., 2′ methoxy or 2′ halide substitutions. Nitrogenous bases can be conventional bases (A, G, C, T, U), analogs thereof (e.g., modified uridines such as 5-methoxyuridine, pseudouridine, or N1-methylpseudouridine, or others); inosine; derivatives of purines or pyrimidines (e.g., N4-methyl deoxyguanosine, deaza- or aza-purines, deaza- or aza-pyrimidines, pyrimidine bases with substituent groups at the 5 or 6 position (e.g., 5-methylcytosine), purine bases with a substituent at the 2, 6, or 8 positions, 2-amino-6-methylaminopurine, 06-methylguanine, 4-thio-pyrimidines, 4-amino-pyrimidines, 4-dimethylhydrazine-pyrimidines, and 04-alkyl-pyrimidines; U.S. Pat. No. 5,378,825 and PCT No. WO 93/13121). For general discussion see The Biochemistry of the Nucleic Acids 5-36, Adams et al., ed., 11th ed., 1992). Nucleic acids can include one or more “abasic” residues where the backbone includes no nitrogenous base for position(s) of the polymer (U.S. Pat. No. 5,585,481). A nucleic acid can comprise only conventional RNA or DNA sugars, bases and linkages, or can include both conventional components and substitutions (e.g., conventional bases with 2′ methoxy linkages, or polymers containing both conventional bases and one or more base analogs). Nucleic acid includes “locked nucleic acid” (LNA), an analogue containing one or more LNA nucleotide monomers with a bicyclic furanose unit locked in an RNA mimicking sugar conformation, which enhance hybridization affinity toward complementary RNA and DNA sequences (Vester and Wengel, 2004, Biochemistry 43(42):13233-41). RNA and DNA have different sugar moieties and can differ by the presence of uracil or analogs thereof in RNA and thymine or analogs thereof in DNA.

[0179] “Polypeptide” as used herein refers to a multimeric compound comprising amino acid residues that can adopt a three-dimensional conformation. Polypeptides include but are not limited to enzymes, enzyme precursor proteins, regulatory proteins, structural proteins, receptors, nucleic acid binding proteins, antibodies, etc. Polypeptides may, but do not necessarily, comprise post-translational modifications, non-natural amino acids, prosthetic groups, and the like.

[0180] As used herein, a “cytidine deaminase” means a polypeptide or complex of polypeptides that is capable of cytidine deaminase activity, that is catalyzing the hydrolytic deamination of cytidine or deoxycytidine, typically resulting in uridine or deoxyuridine. Cytidine deaminases encompass enzymes in the cytidine deaminase superfamily, and in particular, enzymes of the APOBEC family (APOBEC1, APOBEC2, APOBEC4, and APOBEC3 subgroups of enzymes), activation-induced cytidine deaminase (AID or AICDA) and CMP deaminases (see, e.g., Conticello et al., Mol. Biol. Evol. 22:367-77, 2005; Conticello, Genome Biol. 9:229, 2008; Muramatsu et al., J. Biol. Chem. 274: 18470-6, 1999); Carrington et al., Cells 9:1690 (2020)). In some embodiments, variants of any known cytidine deaminase or APOBEC protein are encompassed. Variants include proteins having a sequence that differs from wild-type protein by one or several mutations (i.e., substitutions, deletions, insertions), such as one or several single point substitutions. For instance, a shortened sequence could be used, e.g., by deleting N-terminal, C-terminal, or internal amino acids, preferably one to four amino acids at the C-terminus of the sequence. As used herein, the term “variant” refers to allelic variants, splicing variants, and natural or artificial mutants, which are homologous to a reference sequence. The variant is “functional” in that it shows a catalytic activity of DNA editing.

[0181] As used herein, the term “APOBEC3A” refers to a cytidine deaminase such as the protein expressed by the human A3A gene. The APOBEC3A may have catalytic DNA editing activity. An amino acid sequence of APOBEC3A has been described (UniPROT accession ID: p31941) and is included herein as SEQ ID NO: 151. In some embodiments, the APOBEC3A protein is a human APOBEC3A protein or a wild-type protein. Variants include proteins having a sequence that differs from wild-type APOBEC3A protein by one or several mutations (i.e., substitutions, deletions, insertions), such as one or several single point substitutions. For instance, a shortened APOBEC3A sequence could be used, e.g., by deleting N-terminal, C-terminal, or internal amino acids, preferably one to four amino acids at the C-terminus of the sequence. As used herein, the term “variant” refers to allelic variants, splicing variants, and natural or artificial mutants, which are homologous to an APOBEC3A reference sequence. The variant is “functional” in that it shows a catalytic activity of DNA editing. In some embodiments, an APOBEC3A (such as a human APOBEC3A) has a wild-type amino acid position 57 (as numbered in the wild-type sequence). In some embodiments, an APOBEC3A (such as a human APOBEC3A) has an asparagine at amino acid position 57 (as numbered in the wild-type sequence).

[0182] Several Cas9 orthologs have been obtained from N. meningitidis (Esvelt et al., NAT. METHODS, vol. 10, 2013, 1116-1121; Hou et al., PNAS, vol. 110, 2013, pages 15644-15649) (Nme1Cas9, Nme2Cas9, and Nme3Cas9). The Nme2Cas9 ortholog functions efficiently in mammalian cells, recognizes an N4CC PAM, and can be used for in vivo editing (Ran et al., NATURE, vol. 520, 2015, pages 186-191; Kim et al., NAT. COMMUN., vol. 8, 2017, pages 14500). Nme2Cas9 has been shown to be naturally resistant to off-target editing (Lee et al., MOL. THER., vol. 24, 2016, pages 645-654; Kim et al., 2017). See also e.g., WO/2020081568 (e.g., pages 28 and 42), describing an Nme2Cas9 D16A nickase, the contents of which are hereby incorporated by reference in its entirety. Further, NmeCas9 variants are known in the art, see, e.g., Huang et al., Nature Biotech. 2022, doi.org/10.1038/s41587-022-01410-2, which describes Cas9 variants targeting single-nucleotide-pyrimidine PAMs. Throughout, “NmeCas9” or “Nine Cas9” is generic and an encompasses any type of NmeCas9, including, Nme1Cas9, Nme2Cas9, and Nme3Cas9.

[0183] As used herein, the term “fusion protein” refers to a hybrid polypeptide which comprises polypeptides from at least two different proteins or sources. One polypeptide may be located at the amino-terminal (N-terminal) portion of the fusion protein or at the carboxy-terminal (C-terminal) protein thus forming an “amino-terminal fusion protein” or a “carboxy-terminal fusion protein,” respectively. Any of the proteins provided herein may be produced by any method known in the art. For example, the proteins provided herein may be produced via recombinant protein expression and purification, which is especially suited for fusion proteins comprising a peptide linker. Methods for recombinant protein expression and purification are well known, and include those described by Green and Sambrook, Molecular Cloning: A Laboratory Manual (4th ed., Cold Spring Harbor Laboratory Press, Cold Spring Harbor, N.Y. (2012)), the entire contents of which are incorporated herein by reference.

[0184] As used herein, the term “uracil glycosylase inhibitor”, “uracil-DNA glycosylase inhibitor” or “UGI” refers to a protein that is capable of inhibiting a uracil-DNA glycosylase (UDG) base-excision repair enzyme (e.g., UniProt ID: P14739; SEQ ID NO: 3).

[0185] The term “linker,” as used herein, refers to a chemical group or a molecule linking two adjacent molecules or moieties. Typically, the linker is positioned between, or flanked by, two groups, molecules, or other moieties and connected to each one via a covalent bond. In some embodiments, the linker is an amino acid or a plurality of amino acids (e.g., a peptide or protein). Exemplary peptide linkers are disclosed elsewhere herein.

[0186] “Modified uridine” is used herein to refer to a nucleoside other than thymidine with the same hydrogen bond acceptors as uridine and one or more structural differences from uridine. In some embodiments, a modified uridine is a substituted uridine, i.e., a uridine in which one or more non-proton substituents (e.g., alkoxy, such as methoxy) takes the place of a proton. In some embodiments, a modified uridine is pseudouridine. In some embodiments, a modified uridine is a substituted pseudouridine, i.e., a pseudouridine in which one or more non-proton substituents (e.g., alkyl, such as methyl) takes the place of a proton. In some embodiments, a modified uridine is any of a substituted uridine, pseudouridine, or a substituted pseudouridine, e.g., N1-methyl-psuedouridine.

[0187] “Uridine position” as used herein refers to a position in a polynucleotide occupied by a uridine or a modified uridine. Thus, for example, a polynucleotide in which “100% of the uridine positions are modified uridines” contains a modified uridine at every position that would be a uridine in a conventional RNA (where all bases are standard A, U, C, or G bases) of the same sequence. Unless otherwise indicated, a U in a polynucleotide sequence of a sequence table or sequence listing in or accompanying this disclosure can be a uridine or a modified uridine.

[0188] As used herein, a first sequence is considered to “comprise a sequence with at least X % identity to” a second sequence if an alignment of the first sequence to the second sequence shows that X % or more of the positions of the second sequence in its entirety are matched by the first sequence. For example, the sequence AAGA comprises a sequence with 100% identity to the sequence AAG because an alignment would give 100% identity in that there are matches to all three positions of the second sequence. The differences between RNA and DNA (generally the exchange of uridine for thymidine or vice versa) and the presence of nucleoside analogs such as modified uridines do not contribute to differences in identity or complementarity among polynucleotides as long as the relevant nucleotides (such as thymidine, uridine, or modified uridine) have the same complement (e.g., adenosine for all of thymidine, uridine, or modified uridine; another example is cytosine and 5-methylcytosine, both of which have guanosine as a complement). Thus, for example, the sequence 5′-AXG where X is any modified uridine, such as pseudouridine, N1-methyl pseudouridine, or 5-methoxyuridine, is considered 100% identical to AUG in that both are perfectly complementary to the same sequence (5′-CAU). Exemplary alignment algorithms are the Smith-Waterman and Needleman-Wunsch algorithms, which are well-known in the art. One skilled in the art will understand what choice of algorithm and parameter settings are appropriate for a given pair of sequences to be aligned; for sequences of generally similar length and expected identity>50% for amino acids or >75% for nucleotides, the Needleman-Wunsch algorithm with default settings of the Needleman-Wunsch algorithm interface provided by the EBI at the www.ebi.ac.uk web server is generally appropriate.

[0189] “mRNA” is used herein to refer to a polynucleotide that is RNA or modified RNA and comprises an open reading frame that can be translated into a polypeptide (i.e., can serve as a substrate for translation by a ribosome and amino-acylated tRNAs). mRNA can comprise a phosphate-sugar backbone including ribose residues or analogs thereof, e.g., 2′-methoxy ribose residues. In some embodiments, the sugars of an mRNA phosphate-sugar backbone consist essentially of ribose residues, 2′-methoxy ribose residues, or a combination thereof. In general, mRNAs do not contain a substantial quantity of thymidine residues (e.g., 0 residues or fewer than 30, 20, 10, 5, 4, 3, or 2 thymidine residues; or less than 10%, 9%, 8%, 7%, 6%, 5%, 4%, 4%, 3%, 2%, 1%, 0.5%, 0.2%, or 0.1% thymidine content). An mRNA can contain modified uridines at some or all of its uridine positions.

[0190] As used herein, an “RNA-guided DNA binding agent” means a polypeptide or complex of polypeptides having RNA and DNA binding activity, or a DNA-binding subunit of such a complex, wherein the DNA binding activity is sequence-specific and depends on the sequence of the RNA. Exemplary RNA-guided DNA binding agents include Cas cleavases/nickases and inactivated forms thereof (“dCas DNA binding agents”). “Cas nuclease”, also called “Cas protein”, as used herein, encompasses Cas cleavases, Cas nickases, and dCas DNA binding agents. The dCas DNA binding agent may be a dead nuclease comprising non-functional nuclease domains (RuvC or HNH domain). In some embodiments the Cas cleavase or Cas nickase encompasses a dCas DNA binding agent modified to permit DNA cleavage, e.g., via fusion with a FokI domain. Exemplary nucleotide and polypeptide sequences of Cas9 molecules are provided below. Methods for identifying alternate nucleotide sequences encoding Cas9 polypeptide sequences, including alternate naturally occurring variants, are known in the art. Sequences with at least 75%, 80%, 85%, preferably 90%, 95%, 96%, 97%, 98%, or 99% identity to any of the Cas9 nucleic acid sequences, amino acid sequences, or nucleic acid sequences encoding the amino acid sequences provided herein are also contemplated. Exemplary open reading frame for Cas9 are provided in Table 39A.

[0191] As used herein, the “minimal uridine codon(s)” for a given amino acid is the codon(s) with the fewest uridines (usually 0 or 1 except for a codon for phenylalanine, where the minimal uridine codon has 2 uridines). Modified uridine residues are considered equivalent to uridines for the purpose of evaluating uridine content.

[0192] As used herein, the “uridine dinucleotide (UU) content” of an ORF can be expressed in absolute terms as the enumeration of UU dinucleotides in an ORF or on a rate basis as the percentage of positions occupied by the uridines of uridine dinucleotides (for example, AUUAU would have a uridine dinucleotide content of 40% because 2 of 5 positions are occupied by the uridines of a uridine dinucleotide). Modified uridine residues are considered equivalent to uridines for the purpose of evaluating uridine dinucleotide content.

[0193] As used herein, the “minimal adenine codon(s)” for a given amino acid is the codon(s) with the fewest adenines (usually 0 or 1 except for a codon for lysine and asparagine, where the minimal adenine codon has 2 adenines). Modified adenine residues are considered equivalent to adenines for the purpose of evaluating adenine content.

[0194] As used herein, the “adenine dinucleotide content” of an ORF can be expressed in absolute terms as the enumeration of AA dinucleotides in an ORF or on a rate basis as the percentage of positions occupied by the adenines of adenine dinucleotides (for example, UAAUA would have an adenine dinucleotide content of 40% because 2 of 5 positions are occupied by the adenines of an adenine dinucleotide). Modified adenine residues are considered equivalent to adenines for the purpose of evaluating adenine dinucleotide content.

[0195] As used herein, the “minimum repeat content” of a given open reading frame (ORF) is the minimum possible sum of occurrences of AA, CC, GG, and TT (or TU, UT, or UU) dinucleotides in an ORF that encodes the same amino acid sequence as the given ORF. The repeat content can be expressed in absolute terms as the enumeration of AA, CC, GG, and TT (or TU, UT, or UU) dinucleotides in an ORF or on a rate basis as the enumeration of AA, CC, GG, and TT (or TU, UT, or UU) dinucleotides in an ORF divided by the length in nucleotides of the ORF (for example, UAAUA would have a repeat content of 20% because one repeat occurs in a sequence of 5 nucleotides). Modified adenine, guanine, cytosine, thymine, and uracil residues are considered equivalent to adenine, guanine, cytosine, thymine, and uracil residues for the purpose of evaluating minimum repeat content.

[0196] “Guide RNA”, “gRNA”, and “guide” are used herein interchangeably to refer to either a crRNA (also known as CRISPR RNA), or the combination of a crRNA and a trRNA (also known as tracrRNA). The crRNA and trRNA may be associated as a single RNA molecule (single guide RNA, sgRNA) or in two separate RNA molecules (dual guide RNA, dgRNA). “Guide RNA” or “gRNA” refers to each type. The trRNA may be a naturally occurring sequence, or a trRNA sequence with modifications or variations compared to naturally occurring sequences. Guide RNAs can include modified RNAs as described herein. Unless otherwise clear from the context, guide RNAs described herein are suitable for use with an Nine Cas9, e.g., an Nme1, Nme2, or Nme3 Cas9. For example, FIG. 15 shows an exemplary schematic of Nme2 sgRNA in a possible secondary structure.

[0197] As used herein, a “guide sequence” or “guide region” or “spacer” or “spacer sequence” and the like refers to a sequence within a guide RNA that is complementary to a target sequence and functions to direct a guide RNA to a target sequence for binding or modification (e.g., cleavage) by NmeCas9. A guide sequence can be 20-25 nucleotides in length, e.g., in the case of Nine Cas9 and related Cas9 homologs/orthologs. Shorter or longer sequences can also be used as guides, e.g., 20-, 21-, 22-, 23-, 24-, or 25-nucleotides in length. A guide sequence can be at least 22-, 23-, 24-, or 25-nucleotides in length in the case of Nine Cas9. A guide sequence can form a 22-, 23-, 24, or 25-continuous base pair duplex, e.g., a 24-continuous base pair duplex, with its target sequence in the case of Nine Cas9.

[0198] Target sequences for Cas proteins include both the positive and negative strands of genomic DNA (i.e., the sequence given and the sequence's reverse compliment), as a nucleic acid substrate for a Cas protein is a double stranded nucleic acid. Accordingly, where a guide sequence is said to be “complementary to a target sequence”, it is to be understood that the guide sequence may direct a guide RNA to bind to the reverse complement of a target sequence. Thus, in some embodiments, where the guide sequence binds the reverse complement of a target sequence, the guide sequence is identical to certain nucleotides of the target sequence (e.g., the target sequence not including the PAM) except for the substitution of U for T in the guide sequence.

[0199] As used herein, “indels” refer to insertion/deletion mutations consisting of a number of nucleotides that are either inserted or deleted at the site of double-stranded breaks (DSBs) in the nucleic acid.

[0200] As used herein, “knockdown” refers to a decrease in expression of a particular gene product (e.g., protein, mRNA, or both). Knockdown of a protein can be measured either by detecting protein secreted by tissue or population of cells (e.g., in serum or cell media) or by detecting total cellular amount of the protein from a tissue or cell population of interest. Methods for measuring knockdown of mRNA are known and include sequencing of mRNA isolated from a tissue or cell population of interest. In some embodiments, “knockdown” may refer to some loss of expression of a particular gene product, for example a decrease in the amount of mRNA transcribed or a decrease in the amount of protein expressed or secreted by a population of cells (including in vivo populations such as those found in tissues).

[0201] As used herein, “knockout” refers to a loss of expression of a particular protein in a cell. Knockout can be measured either by detecting the amount of protein secretion from a tissue or population of cells (e.g., in serum or cell media) or by detecting total cellular amount of a protein a tissue or a population of cells. In some embodiments, the methods of the disclosure “knockout” a target protein one or more cells (e.g., in a population of cells including in vivo populations such as those found in tissues). In some embodiments, a knockout is not the formation of mutant of the target protein, for example, created by indels, but rather the complete loss of expression of the target protein in a cell.

[0202] As used herein, “ribonucleoprotein” (RNP) or “RNP complex” refers to a guide RNA together with an RNA-guided DNA binding agent, such as a Cas cleavase, nickase, or dCas DNA binding agent (e.g., Cas9). In some embodiments, the guide RNA guides the RNA-guided DNA binding agent such as Cas9 to a target sequence, and the guide RNA hybridizes with and the agent binds to the target sequence; in cases where the agent is a cleavase or nickase, binding can be followed by cleaving or nicking.

[0203] As used herein, a “target sequence” refers to a sequence of nucleic acid in a target gene that has complementarity to the guide sequence of the gRNA. The interaction of the target sequence and the guide sequence directs an RNA-guided DNA binding agent to bind, and potentially nick or cleave (depending on the activity of the agent), within the target sequence.

[0204] In some embodiments, the target sequence may be adjacent to a PAM. In some embodiments, the PAM may be adjacent to or within 1, 2, 3, or 4, nucleotides of the 3′ end of the target sequence. The length and the sequence of the PAM may depend on the Cas protein used. For example, the PAM may be selected from a consensus or a particular PAM sequence for a specific Nine Cas9 protein or Nine Cas9 ortholog (Edraki et al., 2019). In some embodiments, the PAM may comprise 2, 3, 4, 5, 6, 7, 8, 9, or 10 nucleotides in length. Non-limiting exemplary PAM sequences include NCC, N4GAYW, N4GYTT, N4GTCT, NNNNCC(a), NNNNCAAA (wherein N is defined as any nucleotide, W is defined as either A or T, and R is defined as either A or G; and (a) is a preferred, but not required, A after the second C)). In some embodiments, the PAM sequence may be NCC.

[0205] As used herein, “treatment” refers to any administration or application of a therapeutic for disease or disorder in a subject, and includes slowing or arresting disease development or progression, relieving one or more signs or symptoms of the disease, curing the disease, or preventing reoccurrence of one or more symptoms of the disease.

[0206] As used herein, the term “lipid nanoparticle” (LNP) refers to a particle that comprises a plurality of (i.e., more than one) lipid molecules physically associated with each other by intermolecular forces. The LNPs may be, e.g., microspheres (including unilamellar and multilamellar vesicles, e.g., “liposomes”—lamellar phase lipid bilayers that, in some embodiments, are substantially spherical—and, in more particular embodiments, can comprise an aqueous core, e.g., comprising a substantial portion of RNA molecules), a dispersed phase in an emulsion, micelles, or an internal phase in a suspension. Emulsions, micelles, and suspensions may be suitable compositions for local or topical delivery. See also, e.g., WO2017173054A1, the contents of which are hereby incorporated by reference in their entirety. Any LNP known to those of skill in the art to be capable of delivering nucleotides to subjects may be utilized with the guide RNAs and the nucleic acid encoding an RNA-guided DNA binding agent described herein.

[0207] As used herein, the terms “nuclear localization signal” (NLS) or “nuclear localization sequence” refers to an amino acid sequence which induces transport of molecules comprising such sequences or linked to such sequences into the nucleus of eukaryotic cells. The nuclear localization signal may form part of the molecule to be transported. In some embodiments, the NLS may be linked to the remaining parts of the molecule by covalent bonds, hydrogen bonds or ionic interactions.

[0208] As used herein, “delivering” and “administering” are used interchangeably, and include ex vivo and in vivo applications.

[0209] Co-administration, as used herein, means that a plurality of substances are administered sufficiently close together in time so that the agents act together. Co-administration encompasses administering substances together in a single formulation and administering substances in separate formulations close enough in time so that the agents act together.

[0210] As used herein, the phrase “pharmaceutically acceptable” means that which is useful in preparing a pharmaceutical composition that is generally non-toxic and is not biologically undesirable and that are not otherwise unacceptable for pharmaceutical use. Pharmaceutically acceptable generally refers to substances that are non-pyrogenic. Pharmaceutically acceptable can refer to substances that are sterile, especially for pharmaceutical substances that are for injection or infusion.

### II. Exemplary Polynucleotides and Compositions

[0211] In some embodiments, a polynucleotide is provided, the polynucleotide comprising an open reading frame (ORF), the ORF comprising:
[0212] a nucleotide sequence encoding a C-terminal N. meningitidis (Nine) Cas9 polypeptide at least 90% identical to any one of SEQ ID NOs: 29, 32-41, 224-226, 231-233, 238-240, 245-247, 252-254, 259-261, 266-268, 273-275, 280-282, 287-289, 294-296, 301-303, or 316-321; and
[0213] a nucleotide sequence encoding a first nuclear localization signal (NLS); and In some embodiments, the Nine Cas9 is an Nme2 Cas9. In some embodiments, the Nine Cas9 is an Nme1 Cas9. In some embodiments, the Nine Cas9 is an Nme3 Cas9. In some embodiments, the ORF further comprises a nucleotide sequence encoding a second NLS. In some embodiments, the polynucleotide is an mRNA.

[0214] In some embodiments, the ORF comprises a sequence having at least 90%, 95%, 98% or 100% identity to the sequence of any one of SEQ ID NO: 29, 32-41, 224-226, 231-233, 238-240, 245-247, 252-254, 259-261, 266-268, 273-275, 280-282, 287-289, 294-296, 301-303, or 316-321. In some embodiments, the ORF comprises a sequence having at least 90%, 95%, 98% or 100% identity to the sequence of any one of SEQ ID NO: 29 or 32-41. In some embodiments, the ORF comprises a sequence having at least 90%, 95%, 98% or 100% identity to the sequence of SEQ ID NO: 32. In some embodiments, the ORF comprises a sequence having at least 90%, 95%, 98% or 100% identity to the sequence of SEQ ID NO: 33. In some embodiments, the ORF comprises a sequence having at least 90%, 95%, 98% or 100% identity to the sequence of SEQ ID NO: 34. In some embodiments, the ORF comprises a sequence having at least 90%, 95%, 98% or 100% identity to the sequence of SEQ ID NO: 35. In some embodiments, the ORF comprises a sequence having at least 90%, 95%, 98% or 100% identity to the sequence of SEQ ID NO: 36. In some embodiments, the ORF comprises a sequence having at least 90%, 95%, 98% or 100% identity to the sequence of SEQ ID NO: 38. In some embodiments, the ORF comprises a sequence having at least 90%, 95%, 98% or 100% identity to the sequence of SEQ ID NO: 39. In some embodiments, the ORF comprises a sequence having at least 90%, 95%, 98% or 100% identity to the sequence of SEQ ID NO: 41.

[0215] In some embodiments, the ORF comprises a sequence having at least 90%, 95%, 98% or 100% identity to the sequence of SEQ ID NO: 38 or 41.

[0216] In some embodiments, a polynucleotide is provided, the polynucleotide comprising the ORF disclosed herein. In some embodiments, a polynucleotide is provided, the polynucleotide encoding an Nine Cas9 polypeptide at least 90% identical to any one of SEQ ID NOs: 29, 32-41, 224-226, 231-233, 238-240, 245-247, 252-254, 259-261, 266-268, 273-275, 280-282, 287-289, 294-296, 301-303, or 316-321, wherein the Nine Cas9 is an Nme2 Cas9, Nme3 Cas9, or an Nme1 Cas9, a first nuclear localization signal (NLS); and a second NLS, wherein the encoded first NLS and the second NLS are located to N-terminal to the NmeCas9 polypeptide.

[0217] In some embodiments, a polypeptide is provided, the polypeptide comprising an Nine Cas9 polypeptide at least 90% identical to any one of an amino acid sequence with at least 91%, 92%, 93%, 94%, 95%, 96%, 97%, 98%, or 99% to any one of SEQ ID NOs: 1 and 4-13, 220, 227, 234, 241, 248, 255, 262, 269, 276, 283, 290, or 297, or 310-315, wherein the Nine Cas9 is an Nme2 Cas9, Nme3 Cas9, or an Nme1 Cas9, a first nuclear localization signal (NLS); and a second NLS, wherein the encoded first NLS and the second NLS are located to N-terminal to the NmeCas9 polypeptide.

[0218] In some embodiments, methods of modifying a target gene are provided comprising administering the compositions described herein. In some embodiments, the method comprises delivering to a cell a polynucleotide comprising an open reading frame (ORF), the ORF comprising: a nucleotide sequence encoding a C-terminal N. meningitidis (Nine) Cas9 polypeptide at least 90% identical to any one of SEQ ID NOs: 29, 32-41, 224-226, 231-233, 238-240, 245-247, 252-254, 259-261, 266-268, 273-275, 280-282, 287-289, 294-296, 301-303, or 316-321, wherein the Nine Cas9 is an Nme2 Cas9 or an Nme1 Cas9 or an Nine 3 Cas9; a nucleotide sequence encoding a first nuclear localization signal (NLS); and optionally a nucleotide sequence encoding a second NLS. In some embodiments, the polynucleotide is delivered to a cell in vitro. In some embodiments, the polynucleotide is delivered to a cell in vivo.

[0219] In some embodiments, the composition described herein further comprises at least one gRNA. In some embodiments, a composition is provided that comprises an mRNA described herein and at least one gRNA. In some embodiments, the gRNA is a single guide RNA (sgRNA). In some embodiments, the gRNA is a dual guide RNA (dgRNA).

[0220] In some embodiments, the composition is capable of effecting genome editing upon administration to a subject. In some embodiments, the subject is a human.

### A. RNA-Guided DNA Binding Agent; NmeCas9

[0221] RNA-guided DNA binding agents described herein encompass Neisseria meningitidis Cas9 (NmeCas9) and modified and variants thereof. In some embodiments, the NmeCas9 is Nme2 Cas9. In some embodiments, the NmeCas9 is Nme1 Cas9. In some embodiments, the NmeCas9 is Nme3 Cas9.

[0222] Modified versions having one catalytic domain, either RuvC or HNH, that is inactive are termed “nickases.” Nickases cut only one strand on the target DNA, thus creating a single-strand break. A single-strand break may also be known as a “nick.” In some embodiments, the compositions and methods comprise nickases. In some embodiments, the compositions and methods comprise a nickase RNA-guided DNA binding agent, such as a nickase Cas, e.g., a nickase Cas9, that induces a nick rather than a double strand break in the target DNA.

[0223] In some embodiments, the NmeCas9 nuclease may be modified to contain only one functional nuclease domain. For example, the RNA-guided DNA binding agent may be modified such that one of the nuclease domains is mutated or fully or partially deleted to reduce its nucleic acid cleavage activity.

[0224] In some embodiments, a NmeCas9 nickase is used having a RuvC domain with reduced activity. In some embodiments, a NmeCas9 nickase is used having an inactive RuvC domain. In some embodiments, a NmeCas9 nickase is used having an HNH domain with reduced activity. In some embodiments, a NmeCas9 nickase is used having an inactive HNH domain.

[0225] In some embodiments, a conserved amino acid within a NmeCas9 nuclease domain is substituted to reduce or alter nuclease activity. Wild type Cas9 has two nuclease domains: RuvC and HNH. The RuvC domain cleaves the non-target DNA strand, and the HNH domain cleaves the target strand of DNA. In some embodiments, the Cas9 nuclease comprises more than one RuvC domain or more than one HNH domain. In some embodiments, the Cas9 nuclease is a wild type Cas9. In some embodiments, the Cas9 is capable of inducing a double strand break in target DNA. In certain embodiments, the Cas nuclease may cleave dsDNA, it may cleave one strand of dsDNA, or it may not have DNA cleavase or nickase activity. In some embodiments, a NmeCas9 may comprise an amino acid substitution in the RuvC or RuvC-like nuclease domain. Exemplary amino acid substitutions in the RuvC or RuvC-like nuclease domain include H588A (based on the N. meningitidis Cas9 protein). In some embodiments, the Cas protein may comprise an amino acid substitution in the HNH or HNH-like nuclease domain. Exemplary amino acid substitutions in the HNH or HNH-like nuclease domain include D16A (based on the NmeCas9 protein).

[0226] In some embodiments, chimeric Cas proteins are used, where one domain or region of the protein is replaced by a portion of a different protein. In some embodiments, a NmeCas9 nuclease domain may be replaced with a domain from a different nuclease such as Fok1. In some embodiments, a NmeCas9 protein may be a modified NmeCas9 nuclease.

[0227] In some embodiments, the nuclease may be modified to induce a point mutation or base change, e.g., a deamination.

[0228] In some embodiments, the Cas protein comprises a fusion protein comprising a Cas nuclease (e.g., NmeCas9), which is a nickase or is catalytically inactive, linked to a heterologous functional domain. In some embodiments, the Cas protein comprises a fusion protein comprising a catalytically inactive Cas nuclease (e.g., NmeCas9) linked to a heterologous functional domain (see, e.g., WO2014152432). In some embodiments, the catalytically inactive Cas9 is from the N. meningitidis Cas9. In some embodiments, the catalytically inactive Cas comprises mutations that inactivate the Cas.

[0229] In some embodiments, the heterologous functional domain is a domain that modifies gene expression, histones, or DNA. In some embodiments, the heterologous functional domain is a transcriptional activation domain or a transcriptional repressor domain. In some embodiments, the nuclease is a catalytically inactive Cas nuclease, such as dCas9.

[0230] In some embodiments, the heterologous functional domain is a deaminase, such as a cytidine deaminase or an adenine deaminase. In certain embodiments, the heterologous functional domain is a C to T base converter (cytidine deaminase), such as an apolipoprotein B mRNA editing enzyme (APOBEC) deaminase. A heterologous functional domain such as a deaminase may be part of a fusion protein with a Cas nuclease having nickase activity or a Cas nuclease that is catalytically inactive discussed further below.

[0231] In some embodiments, the Nine Cas9 has double stranded endonuclease activity.

[0232] In some embodiments, the Nine Cas9 has nickase activity.

[0233] In some embodiments, the Nine Cas9 comprises a dCas9 DNA binding domain.

[0234] In some embodiments, the Nine Cas9 comprises an amino acid sequence at least 91%, 92%, 93%, 94%, 95%, 96%, 97%, 98%, or 99% identical to any one of SEQ ID NOs: 1 and 4-13, 220, 227, 234, 241, 248, 255, 262, 269, 276, 283, 290, or 297, or 310-315 (as shown in Table 39A). In some embodiments, the Nine Cas9 comprises an amino acid sequence of any one of SEQ ID NOs: 1 and 4-13, 220, 227, 234, 241, 248, 255, 262, 269, 276, 283, 290, 297, or 310-315 (as shown in Table 39A).

[0235] In some embodiments, the sequence encoding the NmeCas9 comprises a nucleotide sequence at least 91%, 92%, 93%, 94%, 95%, 96%, 97%, 98%, or 99% identical to any one of SEQ ID NOs: 15, 18-27, 29, 32-41, 221-226, 228-233, 235-240, 242-247, 249-254, 256-261, 263-268, 270-275, 277-282, 284-289, 291-296, 298-303, 304-309, or 316-321 (as shown in Table 39A). In some embodiments, the sequence encoding the NmeCas9 comprises a nucleotide sequence of any one of SEQ ID NOs: 15, 18-27, 29, 32-41, 221-226, 228-233, 235-240, 242-247, 249-254, 256-261, 263-268, 270-275, 277-282, 284-289, 291-296, 298-303, 304-309, or 316-321 (as shown in Table 39A).

[0236] In some embodiments, any of the foregoing levels of identity is at least 95%, at least 98%, at least 99%, or 100%.

### B. Exemplary Coding Sequences

[0237] In any of the embodiments set forth herein, the polynucleotide is a mRNA comprising an ORF encoding an RNA-guided DNA binding agent disclosed above. In any of the embodiments set forth herein, the polynucleotide is a mRNA comprising an ORF encoding an NmeCas9. In any of the embodiments set forth herein, the polynucleotide may be an expression construct comprising a promoter operably linked to an ORF encoding an RNA-guided DNA binding agent (e.g., NmeCas9).

[0238] Certain ORFs are translated in vivo more efficiently than others in terms of polypeptide molecules produced per mRNA molecule. The codon pair usage of such efficiently translated ORFs may contribute to translation efficiency. Further description of improvement of ORF coding sequence, codon pair usage, codon repeat contents are disclosed in WO 2019/0067910 and WO 2020/198641, the contents of each of which are hereby incorporated by reference in their entirety.

[0239] For example, in some embodiments, at least 75%, 80%, 85%, 90%, 95%, 98%, 99%, or 100% of the codons of the ORF are minimal adenine codons or minimal uridine codons. In some embodiments, the ORF comprises or consists of codons that increase translation of the mRNA in a mammal. In some embodiments, the ORF comprises or consists of codons that increase translation of the mRNA in a human. An increase in translation in a mammal, cell type, organ of a mammal, human, organ of a human, etc., can be determined relative to the extent of translation wild-type sequence of the ORF, or relative to an ORF having a codon distribution matching the codon distribution of the organism from which the ORF was derived or the organism that contains the most similar ORF at the amino acid level.

[0240] In some embodiments, the GC content of the ORF is greater than or equal to 56%. In some embodiments, the GC content of the ORF is greater than or equal to 56.5%. In some embodiments, the GC content of the ORF is greater than or equal to 57%. In some embodiments, the GC content of the ORF is greater than or equal to 57.5%. In some embodiments, the GC content of the ORF is greater than or equal to 58%. In some embodiments, the GC content of the ORF is greater than or equal to 58.5%. In some embodiments, the GC content of the ORF is greater than or equal to 59%. In some embodiments, the GC content of the ORF is less than or equal to 63%. In some embodiments, the GC content of the ORF is less than or equal to 62.6%. In some embodiments, the GC content of the ORF is less than or equal to 62.1%. In some embodiments, the GC content of the ORF is less than or equal to 61.6%. In some embodiments, the GC content of the ORF is less than or equal to 61.1%. In some embodiments, the GC content of the ORF is less than or equal to 60.6%. In some embodiments, the GC content of the ORF is less than or equal to 60.1%.

[0241] In some embodiments, the ORF consists of a set of codons of which at least about 75%, 80%, 85%, 90%, 95%, 98%, 99%, or 100% of the codons are codons listed in Table 1.

TABLE 1

| Amino Acid | Low A/U |
|---|---|
| Gly | GGC |
| Glu | GAG |
| Asp | GAC |
| Val | GTG |
| Ala | GCC |
| Arg | CGG |
| Ser | AGC |
| Lys | AAG |
| Asn | AAC |
| Met | ATG |
| Ile | ATC |
| Thr | ACC |
| Trp | TGG |
| Cys | TGC |
| Tyr | TAC |
| Leu | CTG |
| Phe | TTC |
| Gln | CAG |
| His | CAC |

1. ORFs with Low Uridine Content

[0242] In some embodiments, the ORF encoding a polypeptide has a uridine content ranging from its minimum uridine content to about 150% of its minimum uridine content. In some embodiments, the uridine content of the ORF is less than or equal to about 145%, 140%, 135%, 130%, 125%, 120%, 115%, 110%, 105%, 104%, 103%, 102%, or 101% of its minimum uridine content. In some embodiments, the ORF has a uridine content equal to its minimum uridine content. In some embodiments, the ORF has having a uridine content less than or equal to about 150% of its minimum uridine content. In some embodiments, the ORF has a uridine content less than or equal to about 145% of its minimum uridine content. In some embodiments, the ORF has a uridine content less than or equal to about 140% of its minimum uridine content. In some embodiments, the ORF has a uridine content less than or equal to about 135% of its minimum uridine content. In some embodiments, the ORF has a uridine content less than or equal to about 130% of its minimum uridine content. In some embodiments, the ORF has a uridine content less than or equal to about 125% of its minimum uridine content. In some embodiments, the ORF has a uridine content less than or equal to about 120% of its minimum uridine content. In some embodiments, the ORF has a uridine content less than or equal to about 115% of its minimum uridine content. In some embodiments, the ORF has a uridine content less than or equal to about 110% of its minimum uridine content. In some embodiments, the ORF has a uridine content less than or equal to about 105% of its minimum uridine content. In some embodiments, the ORF has a uridine content less than or equal to about 104% of its minimum uridine content. In some embodiments, the ORF has a uridine content less than or equal to about 103% of its minimum uridine content. In some embodiments, the ORF has a uridine content less than or equal to about 102% of its minimum uridine content. In some embodiments, the ORF has a uridine content less than or equal to about 101% of its minimum uridine content.

[0243] In some embodiments, the ORF has a uridine dinucleotide content ranging from its minimum uridine dinucleotide content to 200% of its minimum uridine dinucleotide content. In some embodiments, the uridine dinucleotide content of the ORF is less than or equal to about 195%, 190%, 185%, 180%, 175%, 170%, 165%, 160%, 155%, 150%, 145%, 140%, 135%, 130%, 125%, 120%, 115%, 110%, 105%, 104%, 103%, 102%, or 101% of its minimum uridine dinucleotide content. In some embodiments, the ORF has a uridine dinucleotide content equal to its minimum uridine dinucleotide content. In some embodiments, the ORF has a uridine dinucleotide content less than or equal to about 200% of its minimum uridine dinucleotide content. In some embodiments, the ORF has a uridine dinucleotide content less than or equal to about 195% of its minimum uridine dinucleotide content. In some embodiments, the ORF has a uridine dinucleotide content less than or equal to about 190% of its minimum uridine dinucleotide content. In some embodiments, the ORF has a uridine dinucleotide content less than or equal to about 185% of its minimum uridine dinucleotide content. In some embodiments, the ORF has a uridine dinucleotide content less than or equal to about 180% of its minimum uridine dinucleotide content. In some embodiments, the ORF has a uridine dinucleotide content less than or equal to about 175% of its minimum uridine dinucleotide content. In some embodiments, the ORF has a uridine dinucleotide content less than or equal to about 170% of its minimum uridine dinucleotide content. In some embodiments, the ORF has a uridine dinucleotide content less than or equal to about 165% of its minimum uridine dinucleotide content. In some embodiments, the ORF has a uridine dinucleotide content less than or equal to about 160% of its minimum uridine dinucleotide content. In some embodiments, the ORF has a uridine dinucleotide content less than or equal to about 155% of its minimum uridine dinucleotide content. In some embodiments, the ORF has a uridine dinucleotide content equal to its minimum uridine dinucleotide content. In some embodiments, the ORF has a uridine dinucleotide content less than or equal to about 150% of its minimum uridine dinucleotide content. In some embodiments, the ORF has a uridine dinucleotide content less than or equal to about 145% of its minimum uridine dinucleotide content. In some embodiments, the ORF has a uridine dinucleotide content less than or equal to about 140% of its minimum uridine dinucleotide content. In some embodiments, the ORF has a uridine dinucleotide content less than or equal to about 135% of its minimum uridine dinucleotide content. In some embodiments, the ORF has a uridine dinucleotide content less than or equal to about 130% of its minimum uridine dinucleotide content. In some embodiments, the ORF has a uridine dinucleotide content less than or equal to about 125% of its minimum uridine dinucleotide content. In some embodiments, the ORF has a uridine dinucleotide content less than or equal to about 120% of its minimum uridine dinucleotide content. In some embodiments, the ORF has a uridine dinucleotide content less than or equal to about 115% of its minimum uridine dinucleotide content. In some embodiments, the ORF has a uridine dinucleotide content less than or equal to about 110% of its minimum uridine dinucleotide content. In some embodiments, the ORF has a uridine dinucleotide content less than or equal to about 105% of its minimum uridine dinucleotide content. In some embodiments, the ORF has a uridine dinucleotide content less than or equal to about 104% of its minimum uridine dinucleotide content. In some embodiments, the ORF has a uridine dinucleotide content less than or equal to about 103% of its minimum uridine dinucleotide content. In some embodiments, the ORF has a uridine dinucleotide content less than or equal to about 102% of its minimum uridine dinucleotide content. In some embodiments, the ORF has a uridine dinucleotide content less than or equal to about 101% of its minimum uridine dinucleotide content.

[0244] In some embodiments, the ORF has a uridine dinucleotide content ranging from its minimum uridine dinucleotide content to the uridine dinucleotide content that is 90% or lower of the maximum uridine dinucleotide content of a reference sequence that encodes the same protein as the mRNA in question. In some embodiments, the uridine dinucleotide content of the ORF is less than or equal to about 85%, 80%, 75%, 70%, 65%, 60%, 55%, 50%, 45%, 40%, 35%, 30%, 25%, 20%, 15%, 10%, or 5% of the maximum uridine dinucleotide content of a reference sequence that encodes the same protein as the mRNA in question.

[0245] In some embodiments, the ORF has a uridine trinucleotide content ranging from 0 uridine trinucleotides to 1, 2, 3, 4, 5, 6, 7, 8, 9, 10, 20, 30, 40, or 50 uridine trinucleotides (where a longer run of uridines counts as the number of unique three-uridine segments within it, e.g., a uridine tetranucleotide contains two uridine trinucleotides, a uridine pentanucleotide contains three uridine trinucleotides, etc.). In some embodiments, the ORF has a uridine trinucleotide content ranging from 0% uridine trinucleotides to 0.1%, 0.2%, 0.3%, 0.4%, 0.5%, 0.6%, 0.7%, 0.8%, 0.9%, 1%, 1.5%, or 2% uridine trinucleotides, where the percentage content of uridine trinucleotides is calculated as the percentage of positions in a sequence that are occupied by uridines that form part of a uridine trinucleotide (or longer run of uridines), such that the sequences UUUAAA and UUUUAAAA would each have a uridine trinucleotide content of 50%. For example, in some embodiments, the ORF has a uridine trinucleotide content less than or equal to 2%. For example, in some embodiments, the ORF has a uridine trinucleotide content less than or equal to 1.5%. In some embodiments, the ORF has a uridine trinucleotide content less than or equal to 1%. In some embodiments, the ORF has a uridine trinucleotide content less than or equal to 0.9%. In some embodiments, the ORF has a uridine trinucleotide content less than or equal to 0.8%. In some embodiments, the ORF has a uridine trinucleotide content less than or equal to 0.7%. In some embodiments, the ORF has a uridine trinucleotide content less than or equal to 0.6%. In some embodiments, the ORF has a uridine trinucleotide content less than or equal to 0.5%. In some embodiments, the ORF has a uridine trinucleotide content less than or equal to 0.4%. In some embodiments, the ORF has a uridine trinucleotide content less than or equal to 0.3%. In some embodiments, the ORF has a uridine trinucleotide content less than or equal to 0.2%. In some embodiments, the ORF has a uridine trinucleotide content less than or equal to 0.10%. In some embodiments, the ORF has no uridine trinucleotides.

[0246] In some embodiments, the ORF has a uridine trinucleotide content ranging from its minimum uridine trinucleotide content to the uridine trinucleotide content that is 90% or lower of the maximum uridine trinucleotide content of a reference sequence that encodes the same protein as the polynucleotide in question. In some embodiments, the uridine trinucleotide content of the ORF is less than or equal to about 85%, 80%, 75%, 70%, 65%, 60%, 55%, 50%, 45%, 40%, 35%, 30%, 25%, 20%, 15%, 10%, or 5% of the maximum uridine trinucleotide content of a reference sequence that encodes the same protein as the polynucleotide in question.

[0247] In some embodiments, the ORF has minimal nucleotide homopolymers, e.g., repetitive strings of the same nucleotides. For example, in some embodiments, when selecting a minimal uridine codon from the codons listed in Table 2, a polynucleotide is constructed by selecting the minimal uridine codons that reduce the number and length of nucleotide homopolymers, e.g., selecting GCA instead of GCC for alanine or selecting GGA instead of GGG for glycine or selecting AAG instead of AAA for lysine.

[0248] A given ORF can be reduced in uridine content or uridine dinucleotide content or uridine trinucleotide content, for example, by using minimal uridine codons in a sufficient fraction of the ORF. For example, an amino acid sequence for a polypeptide encoded by the ORF described herein can be back-translated into an ORF sequence by converting amino acids to codons, wherein some or all of the ORF uses the exemplary minimal uridine codons shown below. In some embodiments, at least about 50%, 55%, 60%, 65%, 70%, 75%, 80%, 85%, 90%, 95%, 98%, 99%, or 100% of the codons in the ORF are codons listed in Table 2.

TABLE 2
Exemplary minimal uridine codons

| | Amino Acid | Minimal uridine codon |
|---|---|---|
| A | Alanine | GCA or GCC or GCG |
| G | Glycine | GGA or GGC or GGG |
| V | Valine | GUC or GUA or GUG |
| D | Aspartic acid | GAC |
| E | Glutamic acid | GAA or GAG |
| I | Isoleucine | AUC or AUA |
| T | Threonine | ACA or ACC or ACG |
| N | Asparagine | AAC |
| K | Lysine | AAG or AAA |
| S | Serine | AGC |
| R | Arginine | AGA or AGG |
| L | Leucine | CUG or CUA or CUC |
| P | Proline | CCG or CCA or CCC |
| H | Histidine | CAC |
| Q | Glutamine | CAG or CAA |
| F | Phenylalanine | UUC |
| Y | Tyrosine | UAC |
| C | Cysteine | UGC |
| W | Tryptophan | UGG |
| M | Methionine | AUG |

[0249] In some embodiments, the ORF consists of a set of codons of which at least about 75%, 80%, 85%, 90%, 95%, 98%, 99%, or 100% of the codons are codons listed in Table 2.

2. ORFs with Low Adenine Content

[0250] In some embodiments, the ORF has an adenine content ranging from its minimum adenine content to about 150% of its minimum adenine content. In some embodiments, the adenine content of the ORF is less than or equal to about 145%, 140%, 135%, 130%, 125%, 120%, 115%, 110%, 105%, 104%, 103%, 102%, or 101% of its minimum adenine content. In some embodiments, the ORF has an adenine content equal to its minimum adenine content. In some embodiments, the ORF has an adenine content less than or equal to about 150% of its minimum adenine content. In some embodiments, the ORF has an adenine content less than or equal to about 145% of its minimum adenine content. In some embodiments, the ORF has an adenine content less than or equal to about 140% of its minimum adenine content. In some embodiments, the ORF has an adenine content less than or equal to about 135% of its minimum adenine content. In some embodiments, the ORF has an adenine content less than or equal to about 130% of its minimum adenine content. In some embodiments, the ORF has an adenine content less than or equal to about 125% of its minimum adenine content. In some embodiments, the ORF has an adenine content less than or equal to about 120% of its minimum adenine content. In some embodiments, the ORF has an adenine content less than or equal to about 115% of its minimum adenine content. In some embodiments, the ORF has an adenine content less than or equal to about 110% of its minimum adenine content. In some embodiments the ORF has an adenine content less than or equal to about 105% of its minimum adenine content. In some embodiments, the ORF has an adenine content less than or equal to about 104% of its minimum adenine content. In some embodiments, the ORF has an adenine content less than or equal to about 103% of its minimum adenine content. In some embodiments, the ORF has an adenine content less than or equal to about 102% of its minimum adenine content. In some embodiments, the ORF has an adenine content less than or equal to about 101% of its minimum adenine content.

[0251] In some embodiments, the ORF has an adenine dinucleotide content ranging from its minimum adenine dinucleotide content to 200% of its minimum adenine dinucleotide content. In some embodiments, the adenine dinucleotide content of the ORF is less than or equal to about 195%, 190%, 185%, 180%, 175%, 170%, 165%, 160%, 155%, 150%, 145%, 140%, 135%, 130%, 125%, 120%, 115%, 110%, 105%, 104%, 103%, 102%, or 101% of its minimum adenine dinucleotide content. In some embodiments, the ORF has an adenine dinucleotide content equal to its minimum adenine dinucleotide content. In some embodiments, the ORF has an adenine dinucleotide content less than or equal to about 200% of its minimum adenine dinucleotide content. In some embodiments, the ORF has an adenine dinucleotide content less than or equal to about 195% of its minimum adenine dinucleotide content. In some embodiments, the ORF has an adenine dinucleotide content less than or equal to about 190% of its minimum adenine dinucleotide content. In some embodiments, the ORF has an adenine dinucleotide content less than or equal to about 185% of its minimum adenine dinucleotide content. In some embodiments, the ORF has an adenine dinucleotide content less than or equal to about 180% of its minimum adenine dinucleotide content. In some embodiments, the ORF has an adenine dinucleotide content less than or equal to about 175% of its minimum adenine dinucleotide content. In some embodiments, the ORF has an adenine dinucleotide content less than or equal to about 170% of its minimum adenine dinucleotide content. In some embodiments, the ORF has an adenine dinucleotide content less than or equal to about 165% of its minimum adenine dinucleotide content. In some embodiments, the ORF has an adenine dinucleotide content less than or equal to about 160% of its minimum adenine dinucleotide content. In some embodiments, the ORF has an adenine dinucleotide content less than or equal to about 155% of its minimum adenine dinucleotide content. In some embodiments, the ORF has an adenine dinucleotide content equal to its minimum adenine dinucleotide content. In some embodiments, the ORF has an adenine dinucleotide content less than or equal to about 150% of its minimum adenine dinucleotide content. In some embodiments, the ORF has an adenine dinucleotide content less than or equal to about 145% of its minimum adenine dinucleotide content. In some embodiments, the ORF has an adenine dinucleotide content less than or equal to about 140% of its minimum adenine dinucleotide content. In some embodiments, the ORF has an adenine dinucleotide content less than or equal to about 135% of its minimum adenine dinucleotide content. In some embodiments, the ORF has an adenine dinucleotide content less than or equal to about 130% of its minimum adenine dinucleotide content. In some embodiments, the ORF has an adenine dinucleotide content less than or equal to about 125% of its minimum adenine dinucleotide content. In some embodiments, the ORF has an adenine dinucleotide content less than or equal to about 120% of its minimum adenine dinucleotide content. In some embodiments, the ORF has an adenine dinucleotide content less than or equal to about 115% of its minimum adenine dinucleotide content. In some embodiments, the ORF has an adenine dinucleotide content less than or equal to about 110% of its minimum adenine dinucleotide content. In some embodiments, the ORF has an adenine dinucleotide content less than or equal to about 105% of its minimum adenine dinucleotide content. In some embodiments, the ORF has an adenine dinucleotide content less than or equal to about 104% of its minimum adenine dinucleotide content. In some embodiments, the ORF has an adenine dinucleotide content less than or equal to about 103% of its minimum adenine dinucleotide content. In some embodiments, the ORF has an adenine dinucleotide content less than or equal to about 102% of its minimum adenine dinucleotide content. In some embodiments, the ORF has an adenine dinucleotide content less than or equal to about 101% of its minimum adenine dinucleotide content.

[0252] In some embodiments, the ORF has an adenine dinucleotide content ranging from its minimum adenine dinucleotide content to the adenine dinucleotide content that is 90% or lower of the maximum adenine dinucleotide content of a reference sequence that encodes the same protein as the polynucleotide in question. In some embodiments, the adenine dinucleotide content of the ORF is less than or equal to about 85%, 80%, 75%, 70%, 65%, 60%, 55%, 50%, 45%, 40%, 35%, 30%, 25%, 20%, 15%, 10%, or 5% of the maximum adenine dinucleotide content of a reference sequence that encodes the same protein as the polynucleotide in question.

[0253] In some embodiments, the ORF has an adenine trinucleotide content ranging from 0 adenine trinucleotides to 1, 2, 3, 4, 5, 6, 7, 8, 9, 10, 20, 30, 40, or 50 adenine trinucleotides (where a longer run of adenines counts as the number of unique three-adenine segments within it, e.g., an adenine tetranucleotide contains two adenine trinucleotides, an adenine pentanucleotide contains three adenine trinucleotides, etc.). In some embodiments, the ORF has an adenine trinucleotide content ranging from 0% adenine trinucleotides to 0.1%, 0.2%, 0.3%, 0.4%, 0.5%, 0.6%, 0.7%, 0.8%, 0.9%, 1%, 1.5%, or 2% adenine trinucleotides, where the percentage content of adenine trinucleotides is calculated as the percentage of positions in a sequence that are occupied by adenines that form part of an adenine trinucleotide (or longer run of adenines), such that the sequences UUUAAA and UUUUAAAA would each have an adenine trinucleotide content of 50%. For example, in some embodiments, the ORF has an adenine trinucleotide content less than or equal to 2%. For example, in some embodiments, the ORF has an adenine trinucleotide content less than or equal to 1.5%. In some embodiments, the ORF has an adenine trinucleotide content less than or equal to 1%. In some embodiments, the ORF has an adenine trinucleotide content less than or equal to 0.9%. In some embodiments, the ORF has an adenine trinucleotide content less than or equal to 0.8%. In some embodiments, the ORF has an adenine trinucleotide content less than or equal to 0.7%. In some embodiments, the ORF has an adenine trinucleotide content less than or equal to 0.6%. In some embodiments, the ORF has an adenine trinucleotide content less than or equal to 0.5%. In some embodiments, the ORF has an adenine trinucleotide content less than or equal to 0.4%. In some embodiments, the ORF has an adenine trinucleotide content less than or equal to 0.3%. In some embodiments, the ORF has an adenine trinucleotide content less than or equal to 0.2%. In some embodiments, the ORF has an adenine trinucleotide content less than or equal to 0.1%. In some embodiments, the ORF has no adenine trinucleotides.

[0254] In some embodiments, the ORF has an adenine trinucleotide content ranging from its minimum adenine trinucleotide content to the adenine trinucleotide content that is 90% or lower of the maximum adenine trinucleotide content of a reference sequence that encodes the same protein as the polynucleotide in question. In some embodiments, the adenine trinucleotide content of the ORF is less than or equal to about 85%, 80%, 75%, 70%, 65%, 60%, 55%, 50%, 45%, 40%, 35%, 30%, 25%, 20%, 15%, 10%, or 5% of the maximum adenine trinucleotide content of a reference sequence that encodes the same protein as the polynucleotide in question. In some embodiments, the ORF has minimal nucleotide homopolymers, e.g., repetitive strings of the same nucleotides. For example, in some embodiments, when selecting a minimal adenine codon from the codons listed in Table 3, a polynucleotide is constructed by selecting the minimal adenine codons that reduce the number and length of nucleotide homopolymers, e.g., selecting GCA instead of GCC for alanine or selecting GGA instead of GGG for glycine or selecting AAG instead of AAA for lysine. A given ORF can be reduced in adenine content or adenine dinucleotide content or adenine trinucleotide content, for example, by using minimal adenine codons in a sufficient fraction of the ORF. For example, an amino acid sequence for a polypeptide encoded by the ORF described herein can be back-translated into an ORF sequence by converting amino acids to codons, wherein some or all of the ORF uses the exemplary minimal adenine codons shown below. In some embodiments, at least about 50%, 55%, 60%, 65%, 70%, 75%, 80%, 85%, 90%, 95%, 98%, 99%, or 100% of the codons in the ORF are codons listed in Table 3.

TABLE 3
Exemplary minimal adenine codons

| | Amino Acid | Minimal adenine codon |
|---|---|---|
| A | Alanine | GCU or GCC or GCG |
| G | Glycine | GGU or GGC or GGG |
| V | Valine | GUC or GUU or GUG |
| D | Aspartic acid | GAC or GAU |
| E | Glutamic acid | GAG |
| I | Isoleucine | AUC or AUU |
| T | Threonine | ACU or ACC or ACG |
| N | Asparagine | AAC or AAU |
| K | Lysine | AAG |
| S | Serine | UCU or UCC or UCG |
| R | Arginine | CGU or CGC or CGG |
| L | Leucine | CUG or CUC or CUU |
| P | Proline | CCG or CCU or CCC |
| H | Histidine | CAC or CAU |
| Q | Glutamine | CAG |
| F | Phenylalanine | UUC or UUU |
| Y | Tyrosine | UAC or UAU |
| C | Cysteine | UGC or UGU |
| W | Tryptophan | UGG |
| M | Methionine | AUG |

[0255] In some embodiments, the ORF consists of a set of codons of which at least about 75%, 80%, 85%, 90%, 95%, 98%, 99%, or 100% of the codons are codons listed in Table 3.

3. ORFs with Low Adenine and Low Uridine Content

[0256] To the extent feasible, any of the features described above with respect to low adenine content can be combined with any of the features described above with respect to low uridine content. For example, the ORF has a uridine content ranging from its minimum uridine content to about 150% of its minimum uridine content (e.g., a uridine content of the ORF is less than or equal to about 145%, 140%, 135%, 130%, 125%, 120%, 115%, 110%, 105%, 104%, 103%, 102%, or 101% of its minimum uridine content) and an adenine content ranging from its minimum adenine content to about 150% of its minimum adenine content (e.g., less than or equal to about 145%, 140%, 135%, 130%, 125%, 120%, 115%, 110%, 105%, 104%, 103%, 102%, or 101% of its minimum adenine content). So too for uridine and adenine dinucleotides. Similarly, the content of uridine nucleotides and adenine dinucleotides in the ORF may be as set forth above. Similarly, the content of uridine dinucleotides and adenine nucleotides in the ORF may be as set forth above.

[0257] A given ORF can be reduced in uridine and adenine nucleotide or dinucleotide content, for example, by using minimal uridine and adenine codons in a sufficient fraction of the ORF. For example, an amino acid sequence for a polypeptide encoded by the ORF described herein can be back-translated into an ORF sequence by converting amino acids to codons, wherein some or all of the ORF uses the exemplary minimal uridine and adenine codons shown below. In some embodiments, at least about 50%, 55%, 60%, 65%, 70%, 75%, 80%, 85%, 90%, 95%, 98%, 99%, or 100% of the codons in the ORF are codons listed in Table 4.

TABLE 4
Exemplary minimal uridine and adenine codons

| | Amino Acid | Minimal uridine codon |
|---|---|---|
| A | Alanine | GCC or GCG |
| G | Glycine | GGC or GGG |
| V | Valine | GUC or GUG |
| D | Aspartic acid | GAC |
| E | Glutamic acid | GAG |
| I | Isoleucine | AUC |
| T | Threonine | ACC or ACG |
| N | Asparagine | AAC |
| K | Lysine | AAG |
| S | Serine | AGC or UCC or UCG |
| R | Arginine | CGC or CGG |
| L | Leucine | CUG or CUC |
| P | Proline | CCG or CCC |
| H | Histidine | CAC |
| Q | Glutamine | CAG |
| F | Phenylalanine | UUC |
| Y | Tyrosine | UAC |
| C | Cysteine | UGC |
| W | Tryptophan | UGG |
| M | Methionine | AUG |

[0258] In some embodiments, the ORF consists of a set of codons of which at least about 75%, 80%, 85%, 90%, 95%, 98%, 99%, or 100% of the codons are codons listed in Table 4. As can be seen in Table 4, each of the three listed serine codons contains either one A or one U. In some embodiments, uridine minimization is prioritized by using AGC codons for serine. In some embodiments, adenine minimization is prioritized by using UCC or UCG codons for serine.

4. Codons that Increase Translation or that Correspond to Highly Expressed tRNAs; Exemplary Codon Sets

[0259] In some embodiments, the ORF has codons that increase translation in a mammal, such as a human. In further embodiments, the ORF has codons that increase translation in an organ, such as the liver, of the mammal, e.g., a human. In further embodiments, the ORF has codons that increase translation in a cell type, such as a hepatocyte, of the mammal, e.g., a human. An increase in translation in a mammal, cell type, organ of a mammal, human, organ of a human, etc., can be determined relative to the extent of translation wild-type sequence of the ORF, or relative to an ORF having a codon distribution matching the codon distribution of the organism from which the ORF was derived or the organism that contains the most similar ORF at the amino acid level.

[0260] In some embodiments, the polypeptide encoded by the ORF is a Cas9 nuclease derived from prokaryotes described below, and an increase in translation in a mammal, cell type, organ of a mammal, human, organ of a human, etc., can be determined relative to the extent of translation wild-type sequence of the ORF, or relative to an ORF of interest, such as an ORF encoding a human protein or transgene for expression in a human cell. For example, the ORF may be an ORF having a codon distribution matching the codon distribution of the organism from which the ORF was derived or the organism that contains the most similar ORF at the amino acid level, such as N. meningitidis, or relative to translation of the Cas9 ORF contained in SEQ ID NO: 29, 32-41, 224-226, 231-233, 238-240, 245-247, 252-254, 259-261, 266-268, 273-275, 280-282, 287-289, 294-296, 301-303, or 316-321 with all else equal, including any applicable point mutations, heterologous domains, and the like. Codons useful for increasing expression in a human, including the human liver and human hepatocytes, can be codons corresponding to highly expressed tRNAs in the human liver/hepatocytes, which are discussed in Dittmar K A, PLOS Genetics 2(12): e221 (2006). In some embodiments, at least about 75%, 80%, 85%, 90%, 95%, 96%, 97%, 98%, 99%, or 100% of the codons in an ORF are codons corresponding to highly expressed tRNAs (e.g., the highest-expressed tRNA for each amino acid) in a mammal, such as a human. In some embodiments, at least 75%, 80%, 85%, 90%, 95%, 96%, 97%, 98%, 99%, or 100% of the codons in an ORF are codons corresponding to highly expressed tRNAs (e.g., the highest-expressed tRNA for each amino acid) in a mammalian organ, such as a human organ. In some embodiments, at least 75%, 80%, 85%, 90%, 95%, 96%, 97%, 98%, 99%, or 100% of the codons in an ORF are codons corresponding to highly expressed tRNAs (e.g., the highest-expressed tRNA for each amino acid) in a mammalian liver, such as a human liver. In some embodiments, at least 75%, 80%, 85%, 90%, 95%, 96%, 97%, 98%, 99%, or 100% of the codons in an ORF are codons corresponding to highly expressed tRNAs (e.g., the highest-expressed tRNA for each amino acid) in a mammalian hepatocyte, such as a human hepatocyte.

[0261] Alternatively, codons corresponding to highly expressed tRNAs in an organism (e.g., human) in general may be used.

[0262] Any of the foregoing approaches to codon selection can be combined with selecting codon that contribute to lower repeat content; or using a codon set of Table 1, as shown above; using the minimal uridine or adenine codons shown above, e.g., Table 2, 3, or 4, and then where more than one option is available, using the codon that corresponds to a more highly-expressed tRNA, either in the organism (e.g., human) in general, or in an organ or cell type of interest, such as the liver or hepatocytes (e.g., human liver or human hepatocytes).

### C. Nuclear Localization Signals (NLS)

[0263] The nuclear localization signal (NLS) disclosed herein may facilitate transport of the RNA-guided DNA-binding agent into the nucleus of a cell. The first NLS and, when present, the second NLS disclosed herein may be linked at the N-terminus to the RNA-guided DNA-binding agent sequence, i.e., the RNA-guided DNA binding agent is the C-terminal domain in the encoded polypeptide. The first NLS and, when present, the second NLS disclosed herein may be linked at the N-terminus to the NmeCas9 coding sequence. Additional NLS may be linked at the N-terminus of the NmeCas9 coding sequence. In some embodiments, the encoded polypeptide comprises three NLSs at the N-terminus to the NmeCas9 coding sequence. In some embodiments, at least one NLS is provided at the C-terminus of the RNA-guided DNA-binding agent sequence (e.g., with or without an intervening spacer between the NLS and the preceding domain). In some embodiments, a first NLS and a second NLS are provided at the C-terminus of the RNA-guided DNA-binding agent sequence (e.g., with or without an intervening spacer between the NLS and the preceding domain).

[0264] Accordingly, in some embodiments, the ORF encoding the polypeptide disclosed herein comprises a coding sequence for the first NLS and a coding sequence for the second NLS such that the encoded first NLS and second NLS are located to N-terminal to the NmeCas9 polypeptide. In some embodiments, the ORF further comprises a coding sequence for a third NLS C-terminal to the ORF encoding the Nine Cas9.

[0265] In some embodiments, the NLS may be a monopartite sequence, such as, e.g., the SV40 NLS, PKKKRKV (SEQ ID NO: 388) or PKKKRRV (SEQ ID NO: 421). In some embodiments, the NLS may be a bipartite sequence, such as the NLS of nucleoplasmin, KRPAATKKAGQAKKKK (SEQ ID NO: 422). In some embodiments, the NLS sequence may comprise LAAKRSRTT (SEQ ID NO: 410), QAAKRSRTT (SEQ ID NO: 411), PAPAKRERTT (SEQ ID NO: 412), QAAKRPRTT (SEQ ID NO: 413), RAAKRPRTT (SEQ ID NO: 414), AAAKRSWSMAA (SEQ ID NO: 415), AAAKRVWSMAF (SEQ ID NO: 416), AAAKRSWSMAF (SEQ ID NO: 417), AAAKRKYFAA (SEQ ID NO: 418), RAAKRKAFAA (SEQ ID NO: 419), or RAAKRKYFAV (SEQ ID NO: 420). The NLS may be a snurportin-1 importin-β (IBB domain, e.g., an SPN1-impβ sequence. See Huber et al., 2002, J. Cell Bio., 156, 467-479. In a specific embodiment, a single PKKKRKV (SEQ ID NO: 388). In some embodiments, the first and second NLS are independently selected from an SV40 NLS, a nucleoplasmin NLS, a bipartite NLS, a c-myc like NLS, and an NLS comprising the sequence KTRAD. In certain embodiments, the first and second NLSs may be the same (e.g., two SV40 NLSs). In certain embodiments, the first and second NLSs may be different.

[0266] In some embodiments, the first NLS is a SV40NLS and the second NLS is a nucleoplasmin NLS.

[0267] In some embodiments, the SV40 NLS comprises a sequence of PKKKRKVE (SEQ ID NO: 383) or KKKRKVE (SEQ ID NO: 384). In some embodiments, the nucleoplasmin NLS comprises a sequence of KRPAATKKAGQAKKKK (SEQ ID NO: 422). In some embodiments, the bipartite NLS comprises a sequence of KRTADGSEFESPKKKRKVE (SEQ ID NO: 385). In some embodiments, the c-myc like NLS comprises a sequence of PAAKKKKLD (SEQ ID NO: 386).

[0268] In some embodiments, one or more NLS(s) according to any of the foregoing embodiments are present in the RNA-guided DNA-binding agent in combination with one or more additional heterologous functional domains, such as any of the heterologous functional domains described below.

### D. Other Heterologous Functional Domains

[0269] In some embodiments, the polypeptide (e.g., RNA-guided DNA-binding agent) encoded by the ORF described herein comprises one or more additional heterologous functional domains (e.g., is or comprises a fusion polypeptide). In some embodiments, the ORF further comprises a nucleotide sequence encoding one or more additional heterologous functional domains.

[0270] In some embodiments, the heterologous functional domain may be capable of modifying the intracellular half-life of the RNA-guided DNA binding agent. In some embodiments, the half-life of the RNA-guided DNA binding agent may be increased. In some embodiments, the half-life of the RNA-guided DNA-binding agent may be reduced. In some embodiments, the heterologous functional domain may be capable of increasing the stability of the RNA-guided DNA-binding agent. In some embodiments, the heterologous functional domain may be capable of reducing the stability of the RNA-guided DNA-binding agent. In some embodiments, the heterologous functional domain may act as a signal peptide for protein degradation. In some embodiments, the protein degradation may be mediated by proteolytic enzymes, such as, for example, proteasomes, lysosomal proteases, or calpain proteases. In some embodiments, the heterologous functional domain may comprise a PEST sequence. In some embodiments, the RNA-guided DNA-binding agent may be modified by addition of ubiquitin or a polyubiquitin chain. In some embodiments, the ubiquitin may be a ubiquitin-like protein (UBL). Non-limiting examples of ubiquitin-like proteins include small ubiquitin-like modifier (SUMO), ubiquitin cross-reactive protein (UCRP, also known as interferon-stimulated gene-15 (ISG15)), ubiquitin-related modifier-1 (URM1), neuronal-precursor-cell-expressed developmentally downregulated protein-8 (NEDD8, also called Rub1 in S. cerevisiae), human leukocyte antigen F-associated (FAT10), autophagy-8 (ATG8) and -12 (ATG12), Fau ubiquitin-like protein (FUB1), membrane-anchored UBL (MUB), ubiquitin fold-modifier-1 (UFM1), and ubiquitin-like protein-5 (UBL5).

[0271] In some embodiments, the heterologous functional domain may be a marker domain. Non-limiting examples of marker domains include fluorescent proteins, purification tags, epitope tags, and reporter gene sequences. In some embodiments, the marker domain may be a fluorescent protein. Non-limiting examples of suitable fluorescent proteins include green fluorescent proteins (e.g., GFP, GFP-2, tagGFP, turboGFP, sfGFP, EGFP, Emerald, Azami Green, Monomeric Azami Green, CopGFP, AceGFP, ZsGreen1), yellow fluorescent proteins (e.g., YFP, EYFP, Citrine, Venus, YPet, PhiYFP, ZsYellow1), blue fluorescent proteins (e.g., EBFP, EBFP2, Azurite, mKalamal, GFPuv, Sapphire, T-sapphire,), cyan fluorescent proteins (e.g., ECFP, Cerulean, CyPet, AmCyan1, Midoriishi-Cyan), red fluorescent proteins (e.g., mKate, mKate2, mPlum, DsRed monomer, mCherry, mRFP1, DsRed-Express, DsRed2, DsRed-Monomer, HcRed-Tandem, HcRed1, AsRed2, eqFP611, mRasberry, mStrawberry, Jred), and orange fluorescent proteins (mOrange, mKO, Kusabira-Orange, Monomeric Kusabira-Orange, mTangerine, tdTomato) or any other suitable fluorescent protein. In other embodiments, the marker domain may be a purification tag or an epitope tag. Non-limiting exemplary tags include glutathione-S-transferase (GST), chitin binding protein (CBP), maltose binding protein (MBP), thioredoxin (TRX), poly(NANP), tandem affinity purification (TAP) tag, myc, AcV5, AU1, AU5, E, ECS, E2, FLAG, HA, nus, Softag 1, Softag 3, Strep, SBP, Glu-Glu, HSV, KT3, S, S1, T7, V5, VSV-G, 6×His, 8×His, biotin carboxyl carrier protein (BCCP), poly-His, calmodulin, and HiBiT. Non-limiting exemplary reporter genes include glutathione-S-transferase (GST), horseradish peroxidase (HRP), chloramphenicol acetyltransferase (CAT), beta-galactosidase, beta-glucuronidase, luciferase, or fluorescent proteins.

[0272] In additional embodiments, the heterologous functional domain may target the RNA-guided DNA-binding agent to a specific organelle, cell type, tissue, or organ.

[0273] In further embodiments, the heterologous functional domain may be an effector domain. When the RNA-guided DNA-binding agent is directed to its target sequence, e.g., when a Cas nuclease is directed to a target sequence by a gRNA, the effector domain may modify or affect the target sequence. In some embodiments, the effector domain may be chosen from a nucleic acid binding domain, a nuclease domain (e.g., a non-Cas nuclease domain), an epigenetic modification domain, a transcriptional activation domain, or a transcriptional repressor domain. In some embodiments, the heterologous functional domain is a nuclease, such as a FokI nuclease. See, e.g., U.S. Pat. No. 9,023,649. In some embodiments, the heterologous functional domain is a transcriptional activator or repressor. See, e.g., Qi et al., “Repurposing CRISPR as an RNA-guided platform for sequence-specific control of gene expression,” Cell 152:1173-83 (2013); Perez-Pinera et al., “RNA-guided gene activation by CRISPR-Cas9-based transcription factors,” Nat. Methods 10:973-6 (2013); Mali et al., “CAS9 transcriptional activators for target specificity screening and paired nickases for cooperative genome engineering,” Nat. Biotechnol. 31:833-8 (2013); Gilbert et al., “CRISPR-mediated modular RNA-guided regulation of transcription in eukaryotes,” Cell 154:442-51 (2013). As such, the RNA-guided DNA-binding agent essentially becomes a transcription factor that can be directed to bind a desired target sequence using a guide RNA. In certain embodiments, the DNA modification domain is a methylation domain, such as a demethylation or methyltransferase domain. In certain embodiments, the effector domain is a DNA modification domain, such as a base-editing domain. In particular embodiments, the DNA modification domain is a nucleic acid editing domain that introduces a specific modification into the DNA, such as a deaminase domain, which are further discussed below.

[0274] Linkers In some embodiments, the ORF further comprises a nucleotide sequence encoding a linker sequence between the first NLS and the second NLS.

[0275] In some embodiments, the ORF further comprises a nucleotide sequence encoding a linker sequence between the Nine Cas9 coding sequence and the NLS proximal to the Nine Cas9 coding sequence.

[0276] In some embodiments, the spacer comprises at least 1, 2, 3, 4, 5, 6, 7, 8, 9, 10, 15, 16, 17, 18, 19, 20, 25, 30, 40, 50, or more amino acids. In some embodiments, the spacer comprises at least 1, 2, 3, 4, 5, 6, 7, 8, 9, 10, 11, 12, 13, 14, 15, 16, 17, 18, 19, or 20 amino acids.

[0277] In some embodiments, the peptide linker is the 16 residue “XTEN” linker, or a variant thereof (See, e.g., the Examples; and Schellenberger et al. A recombinant polypeptide extends the in vivo half-life of peptides and proteins in a tunable manner. Nat. Biotechnol. 27, 1186-1190 (2009)). In some embodiments, the XTEN linker comprises the sequence SGSETPGTSESATPES (SEQ ID NO: 58), SGSETPGTSESA (SEQ ID NO: 59), or SGSETPGTSESATPEGGSGGS (SEQ ID NO: 60).

[0278] In some embodiments, the peptide linker comprises a (GGGGS)ₙ (SEQ ID NO: 62), a (G)ₙ, an (EAAAK)ₙ(SEQ ID NO: 63), a (GGS)ₙ, (SEQ ID NO: 61), or an SGSETPGTSESATPES (SEQ ID NO: 58) motif (see, e.g., Guilinger J P, Thompson D B, Liu D R. Fusion of catalytically inactive Cas9 to FokI nuclease improves the specificity of genome modification. Nat. Biotechnol. 2014; 32(6): 577-82; the entire contents are incorporated herein by reference), or an (XP)ₙ motif, or a combination of any of these, wherein n is independently an integer between 1 and 30. See, WO2015089406, e.g., paragraph [0012], the entire content of which is incorporated herein by reference.

[0279] In some embodiments, the peptide linker comprises one or more sequences selected from SEQ ID NOs: 61-122.

### E. UTRs; Kozak Sequences

[0280] In some embodiments, the polynucleotide comprises at least one UTR from Hydroxysteroid 17-Beta Dehydrogenase 4 (HSD17B4 or HSD), e.g., a 5′ UTR from HSD. In some embodiments, the polynucleotide comprises at least one UTR from a globin mRNA, for example, human alpha globin (HBA) mRNA, human beta globin (HBB) mRNA, or Xenopus laevis beta globin (XBG) mRNA. In some embodiments, the polynucleotide comprises a 5′ UTR, 3′ UTR, or 5′ and 3′ UTRs from a globin mRNA, such as HBA, HBB, or XBG. In some embodiments, the polynucleotide comprises a 5′ UTR from bovine growth hormone, cytomegalovirus (CMV), mouse Hba-a1, HSD, an albumin gene, HBA, HBB, or XBG. In some embodiments, the polynucleotide comprises a 3′ UTR from bovine growth hormone, cytomegalovirus, mouse Hba-a1, HSD, an albumin gene, HBA, HBB, or XBG. In some embodiments, the polynucleotide comprises 5′ and 3′ UTRs from bovine growth hormone, cytomegalovirus, mouse Hba-a1, HSD, an albumin gene, HBA, HBB, XBG, heat shock protein 90 (Hsp90), glyceraldehyde 3-phosphate dehydrogenase (GAPDH), beta-actin, alpha-tubulin, tumor protein (p53), or epidermal growth factor receptor (EGFR).

[0281] In some embodiments, the polynucleotide comprises 5′ and 3′ UTRs that are from the same source, e.g., a constitutively expressed mRNA such as actin, albumin, or a globin such as HBA, HBB, or XBG.

[0282] In some embodiments, the polynucleotide disclosed herein comprises a 5′ UTR with at least 90% identity to any one of SEQ ID NOs: 391-398. In some embodiments, the polynucleotide disclosed herein comprises a 3′ UTR with at least 90% identity to any one of SEQ ID NOs: 399-406. In some embodiments, any of the foregoing levels of identity is at least 95%, at least 98%, at least 99%, or 100%. In some embodiments, an mRNA disclosed herein comprises a 5′ UTR having the sequence of any one of SEQ ID NOs: 391-398. In some embodiments, the polynucleotide disclosed herein comprises a 3′ UTR having the sequence of any one of SEQ ID NOs: 399-406.

[0283] In some embodiments, the polynucleotide does not comprise a 5′ UTR, e.g., there are no additional nucleotides between the 5′ cap and the start codon. In some embodiments, the mRNA comprises a Kozak sequence (described below) between the 5′ cap and the start codon, but does not have any additional 5′ UTR. In some embodiments, the mRNA does not comprise a 3′ UTR, e.g., there are no additional nucleotides between the stop codon and the poly-A tail.

[0284] In some embodiments, the mRNA comprises a Kozak sequence. The Kozak sequence can affect translation initiation and the overall yield of a polypeptide translated from an mRNA. A Kozak sequence includes a methionine codon that can function as the start codon. A minimal Kozak sequence is NNNRUGN wherein at least one of the following is true: the first N is A or G and the second N is G. In the context of a nucleotide sequence, R means a purine (A or G). In some embodiments, the Kozak sequence is RNNRUGN, NNNRUGG, RNNRUGG, RNNAUGN, NNNAUGG, or RNNAUGG. In some embodiments, the Kozak sequence is rccRUGg with zero mismatches or with up to one or two mismatches to positions in lowercase. In some embodiments, the Kozak sequence is rccAUGg with zero mismatches or with up to one or two mismatches to positions in lowercase. In some embodiments, the Kozak sequence is gccRccAUGG (nucleotides 4-13 of SEQ ID NO: 408; SEQ ID NO: 407) with zero mismatches or with up to one, two, or three mismatches to positions in lowercase. In some embodiments, the Kozak sequence is gccAccAUG with zero mismatches or with up to one, two, three, or four mismatches to positions in lowercase. In some embodiments, the Kozak sequence is GCCACCAUG. In some embodiments, the Kozak sequence is gccgccRccAUGG (SEQ ID NO: 408) with zero mismatches or with up to one, two, three, or four mismatches to positions in lowercase.

### 5′ Cap

[0285] In some embodiments, the polynucleotide (e.g., mRNA) disclosed herein comprises a 5′ cap, such as a Cap0, Cap1, or Cap2.

[0286] A 5′ cap is generally a 7-methylguanine ribonucleotide (which may be further modified, as discussed below e.g., with respect to ARCA) linked through a 5′-triphosphate to the 5′ position of the first nucleotide of the 5′-to-3′ chain of the nucleic acid, i.e., the first cap-proximal nucleotide. In Cap0, the riboses of the first and second cap-proximal nucleotides of the mRNA both comprise a 2′-hydroxyl. In Cap1, the riboses of the first and second transcribed nucleotides of the mRNA comprise a 2′-methoxy and a 2′-hydroxyl, respectively. In Cap2, the riboses of the first and second cap-proximal nucleotides of the mRNA both comprise a 2′-methoxy. See, e.g., Katibah et al. (2014) Proc Natl Acad Sci USA 111(33):12025-30; Abbas et al. (2017) Proc Natl Acad Sci USA 114(11):E2106-E2115. Most endogenous higher eukaryotic nucleic acids, including mammalian nucleic acids such as human nucleic acids, comprise Cap1 or Cap2. Cap0 and other cap structures differing from Cap1 and Cap2 may be immunogenic in mammals, such as humans, due to recognition as “non-self” by components of the innate immune system such as IFIT-1 and IFIT-5, which can result in elevated cytokine levels including type I interferon. Components of the innate immune system such as IFIT-1 and IFIT-5 may also compete with eIF4E for binding of a nucleic acids with a cap other than Cap1 or Cap2, potentially inhibiting translation of the nucleic acid.

[0287] A cap can be included co-transcriptionally. For example, ARCA (anti-reverse cap analog; Thermo Fisher Scientific Cat. No. AM8045) is a cap analog comprising a 7-methylguanine 3′-methoxy-5′-triphosphate linked to the 5′ position of a guanine ribonucleotide which can be incorporated in vitro into a transcript at initiation. ARCA results in a Cap0 cap or a Cap0-like cap in which the 2′ position of the first cap-proximal nucleotide is hydroxyl. See, e.g., Stepinski et al., (2001) “Synthesis and properties of mRNAs containing the novel ‘anti-reverse’ cap analogs 7-methyl(3′-O-methyl)GpppG and 7-methyl(3′deoxy)GpppG,” RNA 7: 1486-1495. The ARCA structure is shown below.

[chemical structure]

[0288] CleanCap™ AG (m7G(5′)ppp(5′)(2′OMeA)pG; TriLink Biotechnologies Cat. No. N-7113) or CleanCap™ GG (m7G(5′)ppp(5′)(2′OMeG)pG; TriLink Biotechnologies Cat. No. N-7133) can be used to provide a Cap1 structure co-transcriptionally. 3′-O-methylated versions of CleanCap™ AG and CleanCap™ GG are also available from TriLink Biotechnologies as Cat. Nos. N-7413 and N-7433, respectively. The CleanCap™ AG structure is shown below. CleanCap™ structures are sometimes referred to herein using the last three digits of the catalog numbers listed above (e.g., “CleanCap™ 113” for TriLink Biotechnologies Cat. No. N-7113).

[chemical structure]

[0289] Alternatively, a cap can be added to an RNA post-transcriptionally. For example, Vaccinia capping enzyme is commercially available (New England Biolabs Cat. No. M2080S) and has RNA triphosphatase and guanylyltransferase activities, provided by its D1 subunit, and guanine methyltransferase, provided by its D12 subunit. As such, it can add a 7-methylguanine to an RNA, so as to give Cap0, in the presence of S-adenosyl methionine and GTP. See, e.g., Guo, P. and Moss, B. (1990) Proc. Natl. Acad. Sci. USA 87, 4023-4027; Mao, X. and Shuman, S. (1994) J. Biol. Chem. 269, 24472-24479. For additional discussion of caps and capping approaches, see, e.g., WO2017/053297 and Ishikawa et al., Nucl. Acids. Symp. Ser. (2009) No. 53, 129-130.

### F. Poly-A Tail

[0290] In some embodiments, the polynucleotide is a mRNA that encodes a polypeptide disclosed herein comprising an ORF, and the mRNA further comprises a poly-adenylated (poly-A) tail.

[0291] In some embodiments, the polynucleotide disclosed herein further comprises a poly-A tail sequence or a polyadenylation signal sequence. In some embodiments, the poly-A tail sequence comprises 100-400 nucleotides.

[0292] In some embodiments, the poly-A sequence comprises non-adenine nucleotides. In some instances, the poly-A tail is “interrupted” with one or more non-adenine nucleotide “anchors” at one or more locations within the poly-A tail. The poly-A tails may comprise at least 8 consecutive adenine nucleotides, but also comprise one or more non-adenine nucleotide. As used herein, “non-adenine nucleotides” refer to any natural or non-natural nucleotides that do not comprise adenine. Guanine, thymine, and cytosine nucleotides are exemplary non-adenine nucleotides. Thus, the poly-A tails on the mRNA described herein may comprise consecutive adenine nucleotides located 3′ to nucleotides encoding a polypeptide disclosed herein. In some instances, the poly-A tails on mRNA comprise non-consecutive adenine nucleotides located 3′ to nucleotides encoding an RNA-guided DNA-binding agent or a sequence of interest, wherein non-adenine nucleotides interrupt the adenine nucleotides at regular or irregularly spaced intervals.

[0293] In some embodiments, the poly-A tail is encoded in the plasmid used for in vitro transcription of mRNA and becomes part of the transcript. The poly-A sequence encoded in the plasmid, i.e., the number of consecutive adenine nucleotides in the poly-A sequence, may not be exact, e.g., a 100 poly-A sequence in the plasmid may not result in a precisely 100 poly-A sequence in the transcribed mRNA. In some embodiments, the poly-A tail is not encoded in the plasmid, and is added by PCR tailing or enzymatic tailing, e.g., using E. coli poly(A) polymerase.

[0294] In some embodiments, the one or more non-adenine nucleotides are positioned to interrupt the consecutive adenine nucleotides so that a poly(A) binding protein can bind to a stretch of consecutive adenine nucleotides. In some embodiments, one or more non-adenine nucleotide(s) is located after at least 8, 9, 10, 11, or 12 consecutive adenine nucleotides. In some embodiments, the one or more non-adenine nucleotide is located after at least 8-50 consecutive adenine nucleotides. In some embodiments, the one or more non-adenine nucleotide is located after at least 8-100 consecutive adenine nucleotides. In some embodiments, the non-adenine nucleotide is after one, two, three, four, five, six, or seven adenine nucleotides and is followed by at least 8 consecutive adenine nucleotides.

[0295] The poly-A tail of the present disclosure may comprise one sequence of consecutive adenine nucleotides followed by one or more non-adenine nucleotides, optionally followed by additional adenine nucleotides.

[0296] In some embodiments, the poly-A tail comprises or contains one non-adenine nucleotide or one consecutive stretch of 2-10 non-adenine nucleotides. In some embodiments, the non-adenine nucleotide(s) is located after at least 8, 9, 10, 11, or 12 consecutive adenine nucleotides. In some instances, the one or more non-adenine nucleotides are located after at least 8-50 consecutive adenine nucleotides. In some embodiments, the one or more non-adenine nucleotides are located after at least 8, 9, 10, 11, 12, 13, 14, 15, 16, 17, 18, 19, 20, 21, 22, 23, 24, 25, 26, 27, 28, 29, 30, 31, 32, 33, 34, 35, 36, 37, 38, 39, 40, 41, 42, 43, 44, 45, 46, 47, 48, 49, or 50 consecutive adenine nucleotides.

[0297] In some embodiments, the non-adenine nucleotide is guanine, cytosine, or thymine. In some instances, the non-adenine nucleotide is a guanine nucleotide. In some embodiments, the non-adenine nucleotide is a cytosine nucleotide. In some embodiments, the non-adenine nucleotide is a thymine nucleotide. In some instances, where more than one non-adenine nucleotide is present, the non-adenine nucleotide may be selected from: a) guanine and thymine nucleotides; b) guanine and cytosine nucleotides; c) thymine and cytosine nucleotides; or d) guanine, thymine and cytosine nucleotides. An exemplary poly-A tail comprising non-adenine nucleotides is provided as SEQ ID NO: 409.

[0298] In some embodiments, the poly-A tail sequence comprises a sequence of SEQ ID NO: 409.

### G. Modified Nucleotides

[0299] In some embodiments, a nucleic acid comprising an ORF encoding a polypeptide disclosed herein comprises a modified uridine at some or all uridine positions.

[0300] In some embodiments, the modified uridine is a uridine modified at the 5 position, e.g., with a halogen or C1-C3 alkoxy. In some embodiments, the modified uridine is a pseudouridine modified at the 1 position, e.g., with a C1-C3 alkyl. The modified uridine can be, for example, pseudouridine, N1-methyl-pseudouridine, 5-methoxyuridine, 5-iodouridine, or a combination thereof. In some embodiments the modified uridine is 5-methoxyuridine. In some embodiments the modified uridine is 5-iodouridine. In some embodiments the modified uridine is pseudouridine. In some embodiments, the modified uridine is N1-methyl-pseudouridine. In some embodiments, the modified uridine is a combination of pseudouridine and N1-methyl-pseudouridine. In some embodiments, the modified uridine is a combination of pseudouridine and 5-methoxyuridine. In some embodiments, the modified uridine is a combination of N1-methyl pseudouridine and 5-methoxyuridine. In some embodiments, the modified uridine is a combination of 5-iodouridine and N1-methyl-pseudouridine. In some embodiments, the modified uridine is a combination of pseudouridine and 5-iodouridine. In some embodiments, the modified uridine is a combination of 5-iodouridine and 5-methoxyuridine.

[0301] In some embodiments, at least 10%, 15%, 20%, 25%, 30%, 35%, 40%, 45%, 50%, 55%, 60%, 65%, 70%, 75%, 80%, 85%, 90%, 95%, 98%, 99%, or 100% of the uridine positions in a polynucleotide according to the disclosure are modified uridines. In some embodiments, at least 10% of the uridine of the uridine positions in a polynucleotide according to the disclosure is substituted with a modified uridine. In some embodiments, at least 20% of the uridine of the uridine positions in a polynucleotide according to the disclosure is substituted with a modified uridine. In some embodiments, at least 30% of the uridine of the uridine positions in a polynucleotide according to the disclosure is substituted with a modified uridine. In some embodiments, at least 80% of the uridine of the uridine positions in a polynucleotide according to the disclosure is substituted with a modified uridine. In some embodiments, at least 90% of the uridine of the uridine positions in a polynucleotide according to the disclosure is substituted with a modified uridine.

[0302] In some embodiments, 10%-25%, 15-25%, 25-35%, 35-45%, 45-55%, 55-65%, 65-75%, 75-85%, 85-95%, or 90-100% of the uridine positions in a polynucleotide according to the disclosure are modified uridine. In some embodiments, 15% to 45% of the uridine of the uridine positions in a polynucleotide according to the disclosure is substituted with a modified uridine.

[0303] In some embodiments, 100% of the uridine of the uridine positions in a polynucleotide according to the disclosure is substituted with a modified uridine.

[0304] In some embodiments, the modified uridine is one or more of N1-methyl-pseudouridine, pseudouridine, 5-methoxyuridine, or 5-iodouridine, or a combination thereof. In some embodiments, the modified uridine is one or both of N1-methyl-pseudouridine or 5-methoxyuridine. In some embodiments, the modified uridine is N1-methyl-pseudouridine. In some embodiments, the modified uridine is 5-methoxyuridine.

[0305] In some embodiments, 10%-25%, 15-25%, 25-35%, 35-45%, 45-55%, 55-65%, 65-75%, 75-85%, 85-95%, or 90-100% of the uridine positions in a polynucleotide according to the disclosure are 5-methoxyuridine. In some embodiments, 10%-25%, 15-25%, 25-35%, 35-45%, 45-55%, 55-65%, 65-75%, 75-85%, 85-95%, or 90-100% of the uridine positions in a polynucleotide according to the disclosure are pseudouridine. In some embodiments, 10%-25%, 15-25%, 25-35%, 35-45%, 45-55%, 55-65%, 65-75%, 75-85%, 85-95%, or 90-100% of the uridine positions in a polynucleotide according to the disclosure are N1-methyl pseudouridine. In some embodiments, 10%-25%, 15-25%, 25-35%, 35-45%, 45-55%, 55-65%, 65-75%, 75-85%, 85-95%, or 90-100% of the uridine positions in a polynucleotide according to the disclosure are 5-iodouridine. In some embodiments, 10%-25%, 15-25%, 25-35%, 35-45%, 45-55%, 55-65%, 65-75%, 75-85%, 85-95%, or 90-100% of the uridine positions in a polynucleotide according to the disclosure are 5-methoxyuridine, and the remainder are N1-methyl pseudouridine. In some embodiments, 10%-25%, 15-25%, 25-35%, 35-45%, 45-55%, 55-65%, 65-75%, 75-85%, 85-95%, or 90-100% of the uridine positions in a polynucleotide according to the disclosure are 5-iodouridine, and the remainder are N1-methyl pseudouridine. In some embodiments, 15% to 45%, 45% to 55%, 55% to 65%, 65% to 75%, 75% to 85%, 85% to 95%, or 90% to 100% of the uridine positions in a polynucleotide according to the disclosure is substituted with the modified uridine, optionally wherein the modified uridine is N1-methyl-pseudouridine. In some embodiments, 15% to 45%, 45% to 55%, 55% to 65%, 65% to 75%, 75% to 85%, 85% to 95%, or 90% to 100% of the uridine positions in a polynucleotide according to the disclosure is substituted with N1-methyl-pseudouridine. In some embodiments, 85%, 90%, 95%, or 100% of the uridine positions in a polynucleotide according to the disclosure is substituted with N1-methyl-pseudouridine. In some embodiments, 100% of the uridine is substituted with N1-methyl-pseudouridine. In some embodiments, 15% to 45%, 45% to 55%, 55% to 65%, 65% to 75%, 75% to 85%, 85% to 95%, or 90% to 100% of the uridine positions in a polynucleotide according to the disclosure is substituted with the modified uridine, optionally wherein the modified uridine is pseudouridine. In some embodiments, 15% to 45%, 45% to 55%, 55% to 65%, 65% to 75%, 75% to 85%, 85% to 95%, or 90% to 100% of the uridine positions in a polynucleotide according to the disclosure is substituted with pseudouridine. In some embodiments, 85%, 90%, 95%, or 100% of the uridine positions in a polynucleotide according to the disclosure is substituted with pseudouridine. In some embodiments, 100% of the uridine is substituted with pseudouridine.

### II. Exemplary Polynucleotides and Compositions Comprising a Deaminase and an RNA-Guided Nickase

[0306] The RNA-guided DNA binding agent disclosed herein may further comprise a base-editing domain that introduces a specific modification into a target nucleic acid, such as a deaminase domain.

[0307] In some embodiments, a nucleic acid is provided, the nucleic acid comprising an open reading frame encoding a polypeptide comprising a cytidine deaminase (e.g., A3A) and a C-terminal NmeCas9 nickase, and a first nuclear localization signal (NLS), wherein the polypeptide does not comprise a uracil glycosylase inhibitor (UGI).

[0308] In some embodiments, a second NLS is N-terminal to the Nine Cas9 nickase. In some embodiments, the deaminase is N-terminal to an NLS (i.e., the first NLS or the second NLS). In some embodiments, the deaminase is N-terminal to all NLS in the polypeptide. In some embodiments, and wherein the polypeptide does not comprise a uracil glycosylase inhibitor (UGI).

[0309] In some embodiments, the polynucleotide is DNA or RNA. In some embodiments, the polynucleotide is mRNA. In some embodiments, a polypeptide encoded by the mRNA is provided.

[0310] In some embodiments, the polypeptide comprises, from N to C terminus, an optional NLS, a cytidine deaminase (e.g., APOBEC3A), an optional linker, a D16A NmeCas9 nickase. In some embodiments, the polypeptide comprises, from N to C terminus, an optional NLS, a cytidine deaminase (e.g., APOBEC3A), an optional linker, a D16A Nme2Cas9 nickase. In some embodiments, the polypeptide comprises, from N to C terminus, first and second NLSs, a cytidine deaminase (e.g., APOBEC3A), an optional linker, a D16A NmeCas9 nickase. In some embodiments, the polypeptide comprises, from N to C terminus, first and second NLSs, a cytidine deaminase (e.g., APOBEC3A), an optional linker, a D16A Nme2Cas9 nickase. In some embodiments, the polypeptide comprises, from N to C terminus, A first NLS, a cytidine deaminase (e.g., APOBEC3A), a second NLS, an optional linker, a D16A NmeCas9 nickase. In some embodiments, the polypeptide comprises, from N to C terminus, A first NLS, a cytidine deaminase (e.g., APOBEC3A), a second NLS, an optional linker, a D16A Nme2Cas9 nickase.

[0311] In some embodiments, the polypeptide comprising A3A and an RNA-guided nickase does not comprise a uracil glycosylase inhibitor (UGI).

[0312] In some embodiments, a composition is provided comprising a first polypeptide, or an mRNA encoding a first polypeptide, comprising a cytidine deaminase, which is optionally an APOBEC3A deaminase (A3A); a C-terminal NmeCas9 nickase; a first nuclear localization signal (NLS); and, optionally, a second NLS; wherein the first NLS and, when present, the second NLS are located to N-terminal to the sequence encoding the NmeCas9 nickase, wherein the first polypeptide does not comprise a uracil glycosylase inhibitor (UGI); and a second polypeptide, or an mRNA encoding a second polypeptide, comprising a uracil glycosylase inhibitor (UGI), wherein the second polypeptide is different from the first polypeptide.

[0313] In some embodiments, methods of modifying a target gene are provided comprising administering the compositions described herein. In some embodiments, the method comprises delivering to a cell a first nucleic acid comprising a first open reading frame encoding a first polypeptide comprising a cytidine deaminase, which is optionally an APOBEC3A deaminase (A3A); a C-terminal NmeCas9 nickase; a first nuclear localization signal (NLS); and, optionally, a second NLS; wherein the first NLS and, when present, the second NLS are located to N-terminal to the sequence encoding the NmeCas9 nickase, wherein the first polypeptide does not comprise a uracil glycosylase inhibitor (UGI), and a second nucleic acid comprising a second open reading frame encoding a uracil glycosylase inhibitor (UGI), wherein the second nucleic acid is different from the first nucleic acid.

[0314] In some embodiments, the methods comprise delivering to a cell a polypeptide comprising a deaminase, which is optionally an APOBEC3A deaminase (A3A); a C-terminal NmeCas9 nickase; a first nuclear localization signal (NLS); and a second NLS; wherein the first NLS and the second NLS are located to N-terminal to the sequence encoding the NmeCas9 nickase, wherein the first polypeptide does not comprise a uracil glycosylase inhibitor (UGI), or a nucleic acid encoding the polypeptide, and delivering to the cell a uracil glycosylase inhibitor (UGI), or a nucleic acid encoding the UGI.

[0315] In some embodiments, a molar ratio of the mRNA encoding UGI to the mRNA encoding the APOBEC3A deaminase (A3A) and an RNA-guided nickase is from about 1:35 to from about 30:1. In some embodiments, the molar ratio is from about 1:25 to about 25:1. In some embodiments, the molar ratio is from about 1:20 to about 25:1. In some embodiments, the molar ratio is from about 1:10 to about 22:1. In some embodiments, the molar ratio is from about 1:5 to about 25:1. In some embodiments, the molar ratio is from about 1:1 to about 30:1. In some embodiments, the molar ratio is from about 2:1 to about 10:1. In some embodiments, the molar ratio is from about 5:1 to about 20:1. In some embodiments, the molar ratio is from about 1:1 to about 25:1. In some embodiments, the molar ratio may be about 1:35, 1:34, 1:33, 1:32, 1:31, 1:30, 1:32, 1:31, 1:30, 1:29, 1:28, 1:27, 1:26, 1:25, 1:24, 1:23, 1:22, 1:21, 1:20, 1:19, 1:18, 1:17, 1:16, 1:15, 1:14, 1:13, 1:12, 1:11, 1:10, 1:9, 1:8, 1:7, 1:6, 1:5, 1:4, 1:3, 1:2, 1:1, 2:1, 3:1, 4:1, 5:1, 6:1, 7:1, 8:1, 9:1, 10:1, 11:1, 12:1, 13:1, 14:1, 15:1, 16:1, 17:1, 18:1, 19:1, 20:1, 21:1, 22:1, 23:1, 24:1, 25:1, 26:1, 27:1, 28:1, 29:1, or 30:1. In some embodiments, the molar ratio is equal to or larger than about 1:1. In some embodiments the molar ratio is about 1:1. In some embodiments the molar ratio is about 2:1. In some embodiments the molar ratio is about 3:1. In some embodiments the molar ratio is about 4:1. In some embodiments the molar ratio is about 5:1. In some embodiments the molar ratio is about 6:1. In some embodiments the molar ratio is about 7:1. In some embodiments the molar ratio is about 8:1. In some embodiments the molar ratio is about 9:1. In some embodiments the molar ratio is about 10:1. In some embodiments the molar ratio is about 11:1. In some embodiments the molar ratio is about 12:1. In some embodiments the molar ratio is about 13:1. In some embodiments the molar ratio is about 14:1. In some embodiments the molar ratio is about 15:1. In some embodiments the molar ratio is about 16:1. In some embodiments the molar ratio is about 17:1. In some embodiments the molar ratio is about 18:1. In some embodiments the molar ratio is about 19:1. In some embodiments the molar ratio is about 20:1. In some embodiments the molar ratio is about 21:1. In some embodiments the molar ratio is about 22:1. In some embodiments the molar ratio is about 23:1. In some embodiments the molar ratio is about 24:1. In some embodiments the molar ratio is about 25:1.

[0316] Similarly, in some embodiments, the molar ratio discussed above for the mRNA encoding the UGI protein to the mRNA encoding the APOBEC3A deaminase (A3A) and an RNA-guided nickase are similar if delivering protein.

[0317] In some embodiments, the composition described herein further comprises at least one gRNA. In some embodiments, a composition is provided that comprises an mRNA described herein and at least one gRNA. In some embodiments, the gRNA is a single guide RNA (sgRNA). In some embodiments, the gRNA is a dual guide RNA (dgRNA).

[0318] In some embodiments, the composition is capable of effecting genome editing upon administration to the subject.

### A. Cytidine Deaminase; APOBEC3A Deaminase

[0319] Cytidine deaminases encompass enzymes in the cytidine deaminase superfamily, and in particular, enzymes of the APOBEC family (APOBEC1, APOBEC2, APOBEC4, and APOBEC3 subgroups of enzymes), activation-induced cytidine deaminase (AID or AICDA) and CMP deaminases (see, e.g., Conticello et al., Mol. Biol. Evol. 22:367-77, 2005; Conticello, Genome Biol. 9:229, 2008; Muramatsu et al., J. Biol. Chem. 274: 18470-6, 1999); and Carrington et al., Cells 9:1690 (2020)).

[0320] In some embodiments, the cytidine deaminase disclosed herein is an enzyme of APOBEC family. In some embodiments, the cytidine deaminase disclosed herein is an enzyme of APOBEC1, APOBEC2, APOBEC4, and APOBEC3 subgroups. In some embodiments, the cytidine deaminase disclosed herein is an enzyme of APOBEC3 subgroup. In some embodiments, the cytidine deaminase disclosed herein is an APOBEC3A deaminase (A3A). In some embodiments, the deaminase comprises an APOBEC3A deaminase.

[0321] In some embodiments, an APOBEC3A deaminase (A3A) disclosed herein is a human A3A. In some embodiments, an APOBEC3A deaminase (A3A) disclosed herein is a human A3A. In some embodiments, the A3A is a wild-type A3A.

[0322] In some embodiment, the A3A is an A3A variant. A3A variants share homology to wild-type A3A, or a fragment thereof. In some embodiments, a A3A variant has at least about 80% identity, at least about 85% identity, at least about 90% identity, at least about 95% identity, at least about 96% identity, at least about 97% identity, at least about 98% identity, at least about 99% identity, at least about 99.5% identity, or at least about 99.9% identity to a wild type A3A. In some embodiments, the A3A variant may have 1, 2, 3, 4, 5, 6, 7, 8, 9, 10, 11, 12, 13, 14, 15, 16, 17, 18, 19, 20, 21, 22, 21, 24, 25, 26, 27, 28, 29, 30, 31, 32, 33, 34, 35, 36, 37, 38, 39, 40, 41, 42, 43, 44, 45, 46, 47, 48, 49, 50 or more amino acid changes compared to a wild type A3A. In some embodiments, the A3A variant comprises a fragment of an A3A, such that the fragment has at least about 80% identity, at least about 90% identity, at least about 95% identity, at least about 96% identity, at least about 97% identity, at least about 98% identity, at least about 99% identity, at least about 99.5% identity, or at least about 99.9% identity to the corresponding fragment of a wild-type A3A.

[0323] In some embodiments, an A3A variant is a protein having a sequence that differs from a wild-type A3A protein by one or several mutations, such as substitutions, deletions, insertions, one or several single point substitutions. In some embodiments, a shortened A3A sequence could be used, e.g., by deleting N-terminal, C-terminal, or internal amino acids. In some embodiments, a shortened A3A sequence is used where one to four amino acids at the C-terminus of the sequence is deleted. In some embodiments, an APOBEC3A (such as a human APOBEC3A) has a wild-type amino acid position 57 (as numbered in the wild-type sequence). In some embodiments, an APOBEC3A (such as a human APOBEC3A) has an asparagine at amino acid position 57 (as numbered in the wild-type sequence).

[0324] In some embodiments, the wild-type A3A is a human A3A (UniProt accession ID: p319411, SEQ ID NO: 151).

[0325] In some embodiments, the A3A disclosed herein comprises an amino acid sequence having at least 80% identity to SEQ ID NO: 151. In some embodiments, the level of identity is at least 85%, at least 87%, at least 90%, at least 95%, at least 98%, at least 99%, or 100%. In some embodiments, the A3A comprises an amino acid sequence having at least 87% identity to SEQ ID NO: 151. In some embodiments, the A3A comprises an amino acid sequence with at least 90% identity to SEQ ID NO: 151. In some embodiments, the A3A comprises an amino acid sequence with at least 95% identity to SEQ ID NO: 151. In some embodiments, the A3A comprises an amino acid sequence with at least 98% identity to SEQ ID NO: 151. In some embodiments, the A3A comprises an amino acid sequence with at least 99% identity to A3A ID NO: 151. In some embodiments, the A3A comprises the amino acid sequence of SEQ ID NO: 151.

[0326] In some embodiments, the cytidine deaminase disclosed herein comprises an amino acid sequence having at least 80% identity to any one of SEQ ID NO: 151-216. In some embodiments, the level of identity is at least 85%, at least 87%, at least 90%, at least 95%, at least 98%, at least 99%, or 100%. In some embodiments, the cytidine deaminase comprises the amino acid sequence of any one of SEQ ID NOs: 151-216.

### B. UGI

[0327] Without being bound by any theory, providing a UGI together with a polypeptide comprising a deaminase may be helpful in the methods described herein by inhibiting cellular DNA repair machinery (e.g., UDG and downstream repair effectors) that recognize a uracil in DNA as a form of DNA damage or otherwise would excise or modify the uracil or surrounding nucleotides. It should be understood that the use of a UGI may increase the editing efficiency of an enzyme that is capable of deaminating C residues.

[0328] Suitable UGI protein and nucleotide sequences are provided herein and additional suitable UGI sequences are known to those in the art, and include, for example, those published in Wang et al., Uracil-DNA glycosylase inhibitor gene of bacteriophage PBS2 encodes a binding protein specific for uracil-DNA glycosylase. J. Biol. Chem. 264: 1163-1171(1989); Lundquist et al., Site-directed mutagenesis and characterization of uracil-DNA glycosylase inhibitor protein. Role of specific carboxylic amino acids in complex formation with Escherichia coli uracil-DNA glycosylase. J. Biol. Chem. 272:21408-21419(1997); Ravishankar et al., X-ray analysis of a complex of Escherichia coli uracil DNA glycosylase (EcUDG) with a proteinaceous inhibitor. The structure elucidation of a prokaryotic UDG. Nucleic Acids Res. 26:4880-4887(1998); and Putnam et al., Protein mimicry of DNA from crystal structures of the uracil-DNA glycosylase inhibitor protein and its complex with Escherichia coli uracil-DNA glycosylase. J. Mol. Biol. 287:331-346(1999), the entire contents of each are incorporated herein by reference. It should be appreciated that any proteins that are capable of inhibiting a uracil-DNA glycosylase base-excision repair enzyme are within the scope of the present disclosure. Additionally, any proteins that block or inhibit base-excision repair as also within the scope of this disclosure. In some embodiments, a uracil glycosylase inhibitor is a protein that binds uracil. In some embodiments, a uracil glycosylase inhibitor is a protein that binds uracil in DNA. In some embodiments, a uracil glycosylase inhibitor is a single-stranded binding protein. In some embodiments, a uracil glycosylase inhibitor is a catalytically inactive uracil DNA-glycosylase protein. In some embodiments, a uracil glycosylase inhibitor is a catalytically inactive uracil DNA-glycosylase protein that does not excise uracil from the DNA. In some embodiments, a uracil glycosylase inhibitor is a catalytically inactive UDG.

[0329] In some embodiments, a uracil glycosylase inhibitor (UGI) disclosed herein comprises an amino acid sequence with at least 80% to SEQ ID NO: 3. In some embodiments, any of the foregoing levels of identity is at least 90%, at least 95%, at least 98%, at least 99%, or 100%. In some embodiments, the UGI comprises an amino acid sequence with at least 90% identity to SEQ ID NO: 3. In some embodiments, the UGI comprises an amino acid sequence with at least 95% identity to SEQ ID NO: 3. In some embodiments, the UGI comprises an amino acid sequence with at least 98% identity to SEQ ID NO: 3. In some embodiments, the UGI comprises an amino acid sequence with at least 99% identity to SEQ ID NO: 3. In some embodiments, the UGI comprises the amino acid sequence of SEQ ID NO: 3.

### C. Linkers

[0330] In some embodiments, the polypeptide comprising the deaminase and the RNA-guided nickase described herein further comprises a linker that connects the deaminase and the RNA-guided nickase. In some embodiments, the linker is a peptide linker. In some embodiments, the nucleic acid encoding the polypeptide comprising the deaminase and the RNA-guided nickase further comprises a sequence encoding the peptide linker. In some embodiments, mRNAs encoding the deaminase-linker-RNA-guided nickase fusion protein are provided.

[0331] In some embodiments, the peptide linker is any stretch of amino acids having at least 1, at least 2, at least 3, at least 4, at least 5, at least 6, at least 7, at least 8, at least 9, at least 10, at least 15, at least 20, at least 25, at least 30, at least 40, at least 50, or more amino acids.

[0332] In some embodiments, the peptide linker is the 16 residue “XTEN” linker, or a variant thereof (See, e.g., the Examples; and Schellenberger et al. A recombinant polypeptide extends the in vivo half-life of peptides and proteins in a tunable manner. Nat. Biotechnol. 27, 1186-1190 (2009)). In some embodiments, the XTEN linker comprises the sequence SGSETPGTSESATPES (SEQ ID NO: 58), SGSETPGTSESA (SEQ ID NO: 59), or SGSETPGTSESATPEGGSGGS (SEQ ID NO: 60).

[0333] In some embodiments, the peptide linker comprises a (GGGGS)ₙ (SEQ ID NO: 62), a (G)ₙ, an (EAAAK)ₙ(SEQ ID NO: 63), a (GGS)ₙ (SEQ ID NO: 61), or an SGSETPGTSESATPES (SEQ ID NO: 58) motif (see, e.g., Guilinger J P, Thompson D B, Liu D R. Fusion of catalytically inactive Cas9 to FokI nuclease improves the specificity of genome modification. Nat. Biotechnol. 2014; 32(6): 577-82; the entire contents are incorporated herein by reference), or an (XP)ₙ motif, or a combination of any of these, wherein n is independently an integer between 1 and 30. See, WO2015089406, e.g., paragraph [0012], the entire content of which is incorporated herein by reference.

[0334] In some embodiments, the peptide linker comprises one or more sequences selected from SEQ ID NOs: 58-122. In some embodiments, the peptide linker comprises one or more sequences selected from SEQ ID NO: 58, SEQ ID NO: 59, SEQ ID NO: 60, SEQ ID NO: 118, SEQ ID NO: 119, SEQ ID NO: 120. SEQ ID NO: 121, and SEQ ID NO: 122.

### D. Compositions Comprising an APOBEC3A Deaminase and an RNA-Guided Nickase

[0335] In some embodiments, an mRNA encoding a polypeptide comprising a cytidine deaminase (e.g., A3A) and an RNA-guided nickase is provided. In some embodiments, the polypeptide comprises a human deaminase (e.g., A3A) and a C-terminal RNA-guided nickase; and a nucleotide sequence encoding a first NLS and optionally a second NLS. In certain embodiments, the deaminase is N-terminal to an NLS. In certain embodiments, the deaminase is N-terminal to all NLS.

[0336] In some embodiments, the polypeptide comprises a wild-type deaminase (e.g., A3A) and a C-terminal RNA-guided nickase. In some embodiments, the polypeptide comprises an A3A variant and an RNA-guided nickase. In some embodiments, the polypeptide comprises a deaminase (e.g., A3A) and a Cas9 nickase. In some embodiments, the polypeptide comprises a deaminase (e.g., A3A) and a D16A NmeCas9 nickase. In some embodiments, the polypeptide comprises a human deaminase (e.g., A3A) and a D16A NmeCas9 nickase. In some embodiments, the polypeptide comprises an A3A variant and a D16A NmeCas9 nickase. In some embodiments, the polypeptide lacks a UGI. In some embodiments, the deaminase (e.g., A3A) and the RNA-guided nickase are linked via a linker. In some embodiments, the polypeptide further comprises one or more additional heterologous functional domains. In some embodiments, the polypeptide further comprises a nuclear localization sequence (NLS) (described herein).

[0337] In some embodiments, the polypeptide comprises a human deaminase (e.g., A3A) and a C-terminal D16A NmeCas9 nickase, wherein the human deaminase (e.g., A3A) and the D16A NmeCas9 are fused via a linker. In some embodiments, the polypeptide comprises a human A3A and a C-terminal D16A NmeCas9 nickase, and a NLS at the N-terminus of the fused polypeptide. In some embodiments, the polypeptide comprises a human A3A and a C-terminal D16A NmeCas9 nickase, wherein the human A3A and the D16A NmeCas9 are fused via a linker, and a NLS fused to the N-terminus of the human A3A, optionally via a linker.

[0338] The polypeptide may be organized in any number of ways to form a single chain. The first NLS and, when present, the second NLS are located to N-terminal to the sequence encoding the Cas9 nickase. Additional NLS can be N-terminal to the Cas9 nickase. The A3A can be N- or C-terminal as compared an NLS. In some embodiments, the polypeptide comprises, from N to C terminus, a first NLS, an optional second NLS, a deaminase, an optional linker, an RNA-guided nickase, and an optional NLS. In some embodiments, linkers are independently present between the first and second NLS, and an NLS and a deaminase. In some embodiments, the polypeptide comprises, from N to C terminus, a deaminase, a first NLS, an optional second NLS, a C-terminal RNA-guided nickase. In some embodiments, linkers are independently present between a deaminase and a first NLS, between a first NLS and a second NLS, and between an NLS and a C-terminal nickase.

[0339] In any of the foregoing embodiments, the polypeptide may comprise an amino acid sequence having at least 80% identity to SEQ ID NOs: 14. In some embodiments, any of the foregoing levels of identity is at least 85%, 90%, 95%, 98%, or 99%, or 100% identical. In some embodiments, the polypeptide disclosed herein may comprise an amino acid sequence with at least 90% identity to SEQ ID NOs: 14. In some embodiments, the polypeptide disclosed herein may comprise an amino acid sequence with at least 95% identity to SEQ ID NOs: 3 or 6. In some embodiments, the polypeptide disclosed herein may comprise an amino acid sequence with at least 98% identity to SEQ ID NOs: 14. In some embodiments, the polypeptide disclosed herein may comprise an amino acid sequence with at least 99% identity to SEQ ID NOs: 14. In some embodiments, the polypeptide disclosed herein may comprise an amino acid sequence of SEQ ID NOs: 14.

[0340] In any of the foregoing embodiments, a nucleic acid sequence comprising an open reading frame encoding the polypeptide disclosed herein may comprise a nucleic acid sequence having at least 80% identity to SEQ ID NOs: 42. In some embodiments, any of the foregoing levels of identity is at least 85%, 90%, 95%, 98%, or 99%, or 100% identical.

[0341] In any of the foregoing embodiments, an mRNA sequence encoding the polypeptide disclosed herein may comprise a nucleic acid sequence having at least 80% identity to SEQ ID NOs: 28. In some embodiments, any of the foregoing levels of identity is at least 85%, 90%, 95%, 98%, or 99%, or 100% identical.

[0342] In any of the foregoing embodiments, the A3A may comprise an amino acid sequence having at least 80% identity to SEQ ID NO: 151. In some embodiments, the level of identity is at least 85%, 87%, 90%, 95%, 98%, or 99%, or 100% identical. In some embodiments, the A3A comprises an amino acid sequence of SEQ ID NO: 151.

[0343] In any of the foregoing embodiments, the NmeCas9 nickase may comprise an amino acid sequence having at least 80%, 90%, 95%, 98%, or 99% identity to any one of SEQ ID NOs: 220, 248, or 276. In some embodiments, the level of identity is at least 85%, 87%, 90%, 95%, 98%, or 99%, or 100% identical. In some embodiments, the RNA-guided nickase comprises the amino acid sequence of SEQ ID NO: 220, 248, or 276. In some embodiments, the RNA-guided nickase comprises the amino acid sequence of SEQ ID NO: 220, 248, or 276. In some embodiments, the RNA-guided nickase comprises the amino acid sequence of SEQ ID NO: 220, 248, or 276.

### III. Guide RNA

[0344] In some embodiments, at least one guide RNA is provided in combination with a polynucleotide disclosed herein, such as a polynucleotide encoding an RNA-guided DNA-binding agent. In some embodiments, a guide RNA is provided as a separate molecule from the polynucleotide. In some embodiments, a guide RNA is provided as a part, such as a part of a UTR, of a polynucleotide disclosed herein.

[0345] In some embodiments, a composition comprising the polynucleotide disclosed herein further comprises at least one guide RNA (or “gRNA”).

[0346] In some embodiments, the gRNA is a single guide RNA (or “sgRNA”).

[0347] In some embodiments, the gRNA is a dual guide RNA.

[0348] In some embodiments, a guide RNA comprises a modified sgRNA. A sgRNA may be modified to improve its in vivo stability.

[0349] In some embodiments, a gRNA described herein is an N. meningitidis Cas9 (NmeCas9) gRNA comprising a conserved portion comprising a repeat/anti-repeat region, a hairpin 1 region, and a hairpin 2 region, wherein one or more of the repeat/anti-repeat region, the hairpin 1 region, and the hairpin 2 region are shortened. Exemplary wild-type NmeCas9 guide RNA comprises a sequence of (N)₂₀₋₂₅ GUUGUAGCUCCCUUUCUCAUUUCGGAAACGAAAUGAGAACCGUUGCUACAAU AAGGCCGUCUGAAAAGAUGUGCCGCAACGCUCUGCCCCUUAAAGCUUCUGCUU UAAGGGGCAUCGUUUA (SEQ ID NO: 500). (N)₂₀₋₂₅ as used herein represent 20-25, i.e., 20, 21, 22, 23, 24, or 25 consecutive N. A, C, G, and U represent nucleotides having adenine, cytosine, guanine, and uracil bases, respectively. In some embodiments, (N)₂₀₋₂₅ has 24 nucleotides in length. N is any natural or non-natural nucleotide, and where the totality of the N's comprises a guide sequence.

[0350] In some embodiments, the single guide RNA comprises a guide region and a conserved region, wherein the conserved region comprising one or more of:
[0351] (a) a shortened repeat/anti-repeat region, wherein the shortened repeat/anti-repeat region lacks 2-24 nucleotides, wherein
   [0352] (i) one or more of nucleotides 37-48 and 53-64 is deleted and optionally one or more of nucleotides 37-64 is substituted relative to SEQ ID NO: 500; and
   [0353] (ii) nucleotide 36 is linked to nucleotide 65 by at least 2 nucleotides; or
[0354] (b) a shortened hairpin 1 region, wherein the shortened hairpin 1 lacks 2-10, optionally 2-8 nucleotides, wherein
   [0355] (i) one or more of nucleotides 82-86 and 91-95 is deleted and optionally one or more of positions 82-96 is substituted relative to SEQ ID NO: 500; and
   [0356] (ii) nucleotide 81 is linked to nucleotide 96 by at least 4 nucleotides; or
[0357] (c) a shortened hairpin 2 region, wherein the shortened hairpin 2 lacks 2-18, optionally 2-16 nucleotides, wherein
   [0358] (i) one or more of nucleotides 113-121 and 126-134 is deleted and optionally one or more of nucleotides 113-134 is substituted relative to SEQ ID NO: 500; and
   [0359] (ii) nucleotide 112 is linked to nucleotide 135 by at least 4 nucleotides;
[0360] wherein one or both nucleotides 144-145 are optionally deleted relative to SEQ ID NO: 500; and wherein at least 10 nucleotides are modified nucleotides.

[0361] In some embodiments, the shortened repeat/anti-repeat region of the gRNA lacks 18 nucleotides. In some embodiments, the shortened repeat/anti-repeat region of the gRNA lacks 22 nucleotides.

[0362] In some embodiments, in the shortened repeat/anti-repeat region of the gRNA, nucleotide 36 is linked to nucleotide 65 by 6 nucleotides. In some embodiments, in the shortened repeat/anti-repeat region of the gRNA, nucleotide 36 is linked to nucleotide 65 by 7 nucleotides. In some embodiments, in the shortened repeat/anti-repeat region of the gRNA, nucleotide 36 is linked to nucleotide 65 by 8 nucleotides. In some embodiments, in the shortened repeat/anti-repeat region of the gRNA, nucleotide 36 is linked to nucleotide 65 by 9 nucleotides. In some embodiments, in the shortened repeat/anti-repeat region of the gRNA, nucleotide 36 is linked to nucleotide 65 by 10 nucleotides.

[0363] In some embodiments, in the shortened repeat/anti-repeat region of the gRNA, nucleotides 38-48 and 53-63 are deleted relative to SEQ ID NO: 500. In some embodiments, in the shortened repeat/anti-repeat region of the gRNA, nucleotides 38, 41-48, 53-60, and 63 are deleted relative to SEQ ID NO: 500.

[0364] In some embodiments, in the shortened repeat/anti-repeat region of the gRNA, nucleotide 36 is linked to nucleotide 65 by 6 nucleotides. In some embodiments, in the shortened repeat/anti-repeat region of the gRNA, nucleotides 38-48 and 53-63 are deleted relative to SEQ ID NO: 500, and nucleotide 36 is linked to nucleotide 65 by nucleotides 37, 49-52, and 64.

[0365] In some embodiments, in the shortened repeat/anti-repeat region of the gRNA, nucleotide 36 is linked to nucleotide 65 by 10 nucleotides. In some embodiments, in the shortened repeat/anti-repeat region of the gRNA, nucleotides 38, 41-48, 53-60, and 63 are deleted relative to SEQ ID NO: 500, and nucleotide 36 is linked to nucleotide 65 by nucleotides 37, 39, 40, 49-52, 61, 62, and 64.

[0366] In some embodiments, all of nucleotides 38-48 and nucleotides 53-63 of the upper stem of the shortened repeat/anti-repeat region are deleted relative to SEQ ID NO: 500.

[0367] In some embodiments, all of nucleotides 39-48 and nucleotides 53-62 of the upper stem of the shortened repeat/anti-repeat region are deleted relative to SEQ ID NO: 500, and nucleotides 38 and 63 is substituted.

[0368] In some embodiments, the shortened repeat/anti-repeat region has 14 modified nucleotides. In some embodiments, the shortened repeat/anti-repeat region has 15 modified nucleotides. In some embodiments, the shortened repeat/anti-repeat region has 16 modified nucleotides. In some embodiments, the shortened repeat/anti-repeat region has 17 modified nucleotides. In some embodiments, the shortened repeat/anti-repeat region has 18 modified nucleotides. In some embodiments, the shortened repeat/anti-repeat region has 19 modified nucleotides. In some embodiments, the shortened repeat/anti-repeat region has 20 modified nucleotides.

[0369] In some embodiments, the shortened hairpin 1 region lacks 2 nucleotides. In some embodiments, the shortened hairpin 1 region lacks 21 nucleotides. In some embodiments, the shortened hairpin 1 region lacks 2 nucleotides, and nucleotides 86 and 91 are deleted relative to SEQ ID NO: 500. In some embodiments, the shortened hairpin 1 region lacks 2 nucleotides, and nucleotides 85 and 92 are deleted relative to SEQ ID NO: 500. In some embodiments, in the shortened hairpin 1 region, nucleotide 81 is linked to nucleotide 96 by 12 nucleotides. In some embodiments, in the shortened hairpin 1 region, nucleotide 81 is linked to nucleotide 96 by 12 nucleotides. In some embodiments, in the shortened hairpin 1 region, nucleotides 86 and 91 are deleted relative to SEQ ID NO: 500, and nucleotide 81 is linked to nucleotide 96 by nucleotides 82-85, 87-90, and 92-95. In some embodiments, in the shortened hairpin 1 region, nucleotides 85 and 92 are deleted relative to SEQ ID NO: 500, and nucleotide 81 is linked to nucleotide 96 by nucleotides 82-84, 86-91, and 93-95.

[0370] In some embodiments, the shortened hairpin 1 region has a duplex portion of 7 base paired nucleotides in length. In some embodiments, the shortened hairpin 1 region has a duplex portion of 8 base paired nucleotides in length.

[0371] In the stem of the shortened hairpin 1 region is seven base paired nucleotides in length. In some embodiments, nucleotides 85-86 and nucleotides 91-92 of the shortened hairpin 1 region are deleted.

[0372] In some embodiments, the shortened hairpin 1 region has 13 modified nucleotides.

[0373] In some embodiments, the shortened hairpin 2 lacks 18 nucleotides. In some embodiments, the shortened hairpin 2 has 24 nucleotides. In some embodiments, in the shortened hairpin 2 nucleotides 113-121 and 126-134 are deleted relative to SEQ ID NO: 500. In some embodiments, the shortened hairpin 2 lacks 18 nucleotides, and nucleotides 113-121 and 126-134 are deleted relative to SEQ ID NO: 500. In some embodiments, in the shortened hairpin 2 region, nucleotide 112 is linked to nucleotide 135 by 4 nucleotides. In some embodiments, in the shortened hairpin 2 region, nucleotides 113-121 and 126-134 are deleted relative to SEQ ID NO: 500 and nucleotide 112 is linked to nucleotide 135 by nucleotides 122-125.

[0374] In some embodiments, the shortened repeat/anti-repeat region has a length of 28 nucleotides. In some embodiments, the shortened repeat/anti-repeat region has a length of 32 nucleotides.

[0375] In some embodiments, the upper stem of the shortened repeat/anti-repeat region comprises no more than one base pair. In some embodiments, the upper stem of the shortened repeat/anti-repeat region comprises no more than three base pairs.

[0376] In some embodiments, the shortened hairpin 2 region has 8 modified nucleotides.

[0377] In some embodiments, a guide RNA (gRNA) comprises a guide region and a conserved region, the conserved region comprising:
[0378] (a) a shortened repeat/anti-repeat region, wherein the shortened repeat/anti-repeat region lacks 18-22 nucleotides relative to SEQ ID NO: 500, wherein
   [0379] (i) nucleotides 38-48 and 53-63 are deleted; and
   [0380] (ii) nucleotide 36 is linked to nucleotide 65 by 6-10 nucleotides;
[0381] (b) a shortened hairpin 1 region, wherein the shortened hairpin 1 lacks 2 nucleotides, wherein nucleotides 86 and 91 are deleted or nucleotides 85 and 92 are deleted relative to SEQ ID NO: 500; and
[0382] (c) a shortened hairpin 2 region, wherein the shortened hairpin 2 lacks 18 nucleotides, wherein nucleotides 113-121 and 126-134 are deleted relative to SEQ ID NO: 500; and wherein nucleotides 144-145 are deleted relative to SEQ ID NO: 500; wherein at least 10 nucleotides are modified nucleotides.

[0383] In some embodiments, a guide RNA (gRNA) comprises a guide region and a conserved region, the conserved region comprising:
[0384] (a) a shortened repeat/anti-repeat region, wherein the shortened repeat/anti-repeat region lacks 18-22 nucleotides relative to SEQ ID NO: 500, wherein
   [0385] (i) nucleotides 38, 41-48, 53-60, and 63 are deleted; and
   [0386] (ii) nucleotide 36 is linked to nucleotide 65 by 6-10 nucleotides;
[0387] (b) a shortened hairpin 1 region, wherein the shortened hairpin 1 lacks 2 nucleotides, wherein nucleotides 86 and 91 are deleted or nucleotides 85 and 92 are deleted relative to SEQ ID NO: 500;
[0388] (c) a shortened hairpin 2 region, wherein the shortened hairpin 2 lacks 18 nucleotides, wherein nucleotides 113-121 and 126-134 are deleted relative to SEQ ID NO: 500; and
[0389] wherein nucleotides 144-145 are deleted relative to SEQ ID NO: 500;
[0390] wherein at least 10 nucleotides are modified nucleotides.

[0391] In some embodiments, a guide RNA (gRNA) is provided, the gRNA comprising a guide region and a conserved region, the conserved region comprising one or more of:
[0392] (a) a shortened repeat/anti-repeat region, wherein the shortened repeat/anti-repeat region lacks 18-22 nucleotides relative to SEQ ID NO: 500, wherein
   [0393] (i) nucleotides 37-48 and 53-64 are deleted; and
   [0394] (ii) nucleotide 36 is linked to nucleotide 65 by 6-10 nucleotides; or
[0395] (b) a shortened hairpin 1 region, wherein the shortened hairpin 1 lacks 2 nucleotides, wherein nucleotides 86 and 91 are deleted or nucleotides 85 and 92 are deleted relative to SEQ ID NO: 500; or
[0396] (c) a shortened hairpin 2 region, wherein the shortened hairpin 2 lacks 18 nucleotides, wherein nucleotides 113-121 and 126-134 are deleted relative to SEQ ID NO: 500; and
[0397] wherein nucleotides 144-145 are deleted relative to SEQ ID NO: 500;
[0398] wherein at least 10 nucleotides are modified nucleotides.

[0399] In further embodiments, the shortened repeat/anti-repeat region, wherein the shortened repeat/anti-repeat region lacks 22 nucleotides relative to SEQ ID NO: 500. In further embodiments, nucleotide 36 is linked to nucleotide 65 by a sequence comprising the nucleotide sequence UGAAAC. In further embodiments, the nucleotide 36 is linked to nucleotide 65 by 10 nucleotides. In further embodiments, the nucleotide 36 is linked to nucleotide 65 by a sequence comprising the nucleotide sequence UUCGAAAGAC.

[0400] In some embodiments, the guide RNA (gRNA) of the previous embodiment comprising a guide region and a conserved region, the conserved region comprising:
[0401] (a) a shortened repeat/anti-repeat region, wherein the shortened repeat/anti-repeat region lacks 18-22 nucleotides, wherein
   [0402] (i) nucleotides 37-48 and 53-64 are deleted relative to SEQ ID NO: 500; and
   [0403] (ii) nucleotide 36 is linked to nucleotide 65 by 6-10 nucleotides;
[0404] (b) a shortened hairpin 1 region, wherein the shortened hairpin 1 lacks 2 nucleotides relative to SEQ ID NO: 500, wherein nucleotides 86 and 91 are deleted or nucleotides 85 and 92 are deleted;
[0405] (c) a shortened hairpin 2 region, wherein the shortened hairpin 2 lacks 18 nucleotides, wherein nucleotides 113-121 and 126-134 are deleted relative to SEQ ID NO: 500; and
[0406] (d) wherein nucleotides 144-145 are deleted relative to SEQ ID NO: 500;
[0407] wherein at least 10 nucleotides are modified nucleotides.

[0408] In further embodiments, the shortened repeat/anti-repeat region, wherein the shortened repeat/anti-repeat region lacks 22 nucleotides relative to SEQ ID NO: 500. In further embodiments, nucleotide 36 is linked to nucleotide 65 by a sequence comprising the nucleotide sequence UGAAAC. In further embodiments, the nucleotide 36 is linked to nucleotide 65 by 10 nucleotides. In further embodiments, the nucleotide 36 is linked to nucleotide 65 by a sequence comprising the nucleotide sequence UUCGAAAGAC.

[0409] FIGS. 33-35 show exemplary sgRNAs in possible secondary structures.

[0410] In some embodiments, the NmeCas9 short-sgRNA comprises one of the following sequences in 5′ to 3′ orientation:

(SEQ ID NO: 501)
(N)₂₀₋₂₅
GUUGUAGCUCCCUGAAACCGUUGCUACAAUAAGGCCGUCGAAAGAUGU
GCCGCAACGCUCUGCCUUCUGGCAUCGUU;
(SEQ ID NO: 502)
(N)₂₀₋₂₅
GUUGUAGCUCCCUGAAACCGUUGCUACAAUAAGGCCGUCGAAAGAUGU
GCCGCAACGCUCUGCCUUCUGGCAUCGUUUAUU;
(SEQ ID NO: 503)
(N)₂₀₋₂₅
GUUGUAGCUCCCUGGAAACCCGUUGCUACAAUAAGGCCGUCGAAAGA
UGUGCCGCAACGCUCUGCCUUCUGGCAUCGUUUAUU;
or
(SEQ ID NO: 514)
(N)₂₀₋₂₅
GUUGUAGCUCCCUUCGAAAGACCGUUGCUACAAUAAGGCCGUCGAAAGAU
GUGCCGCAACGCUCUGCCUUCUGGCAUCGUU,

where N are nucleotides encoding a guide sequence. In some embodiments, N equals 24. In some embodiments, N equals 25. N represents a nucleotide having any base, e.g., A, C, G, or U. (N)₂₀₋₂₅ represent 20-25, i.e., 20, 21, 22, 23, 24, or 25 consecutive N.

[0411] In some embodiments, at least 10 nucleotides of the conserved portion of the NmeCas9 short-sgRNA are modified nucleotides.

[0412] In some embodiments, the NmeCas9 short-sgRNA comprises a conserved region comprising one of the following sequences in 5′ to 3′ orientation: mGUUGmUmAmGmCUCCCmUmGmAmAmAmCmCGUUmGmCUAmCAAU*AAGmG mCCmGmUmCmGmAmAmAmGmAmUGUGCmCGCmAmAmCmGCUCUmGmCCmUm UmCmUGmGCmAmUC*mG*mU*mU (SEQ ID NO: 504); mGUUGmUmAmGmCUCCCmUmGmAmAmAmCmCGUUmGmCUAmCAAU*AAGmG mCCmGmUmCmGmAmAmAmGmAmUGUGCmCGmCAAmCGCUCUmGmCCmUmUm CmUGGCAUCG*mU*mU (SEQ ID NO: 505); or mGUUGmUmAmGmCUCCCmUmUmCmGmAmAmAmGmAmCmCGUUmGmCUAmCA AU*AAGmGmCCmGmUmCmGmAmAmAmGmAmUGUGCmCGmCAAmCGCUCUmG mCCmUmUmCmUGGCAUCG*mU*mU (SEQ ID NO: 515). Additional examples of the NmeCas9 short-gRNA (e.g., SEQ ID NOs: 512-530) are provided in Table 39B.

[0413] In some embodiments, the NmeCas9 short-gRNA comprises one of the following sequences in 5′ to 3′ orientation:

(SEQ ID NO: 512)
mN*mN*mN*mNmNNNmNmNNmNNmNNNNNmNNNNmNNNmGUUGmUmAmGmC
UCCCmUmGmAmAmAmCmCGUUmGmCUAmCAAU*AAGmGmCCmGmUmCmGmA
mAmAmGmAmUGUGCmCGmCAAmCGCUCUmGmCCmUmUmCmUGGCAUCG*mU
*mU;
(SEQ ID NO: 525)
mN*mN*mN*mNmNNNmNmNNmNNmNNNNNmNNNNmNNNmGUUGmUmAmGmC
UCCCmUmGmAmAmAmCmCGUUmGmCUAmCAAUAAGmGmCCmGmUmCmGmAm
AmAmGmAmUGUGCmCGmCAAmCGCUCUmGmCCmUmUmCmUGGCAUCG*mU*
mU;
(SEQ ID NO: 526)
mN*mN*mN*mNmNNNmNmNNmNNmNNNNNmNNNNmNNNmGUUGmUmAmGmC
UCCCmUmGmAmAmAmCmCGUUmGmCUAmCAAU*AAGmGmCCmGmUmCmGmA
mAmAmGmAmUGUGCmCGmCAAmCGmCmUmCmUmGmCCmUmUmCmUGGCAUC
G*mU*mU;
(SEQ ID NO: 527)
mN*mN*mN*mNmNNNmNmNNmNNmNNNNNmNNNNmNNNmGUUGmUmAmGmC
UCCCmUmGmAmAmAmCmCGUUmGmCUAmCAAUAAGmGmCCmGmUmCmGmAm
AmAmGmAmUGUGCmCGmCAAmCGmCmUmCmUmGmCCmUmUmCmUGGCAUCG
*mU*mU;
(SEQ ID NO: 516)
mN*mN*mN*mNmNNNmNmNNmNNmNNNNNmNNNNmNNNmGUUGmUmAmGmC
UCCCmUmUmCmGmAmAmAmGmAmCmCGUUmGmCUAmCAAU*AAGmGmCCmG
mUmCmGmAmAmAmGmAmUGUGCmCGmCAAmCGCUCUmGmCCmUmUmCmUGG
CAUCG*mU*mU;
(SEQ ID NO: 520)
mN*mN*mN*mNmNNNmNmNNmNNmNNNNNmNNNNmNNNmGUUGmUmAmGmC
UCCCmUmUmCmGmAmAmAmGmAmCmCGUUmGmCUAmCAAUAAGmGmCCmGm
UmCmGmAmAmAmGmAmUGUGCmCGmCAAmCGCUCUmGmCCmUmUmCmUGGC
AUCG*mU*mU;
(SEQ ID NO: 521)
mN*mN*mN*mNmNNNmNmNNmNNmNNNNNmNNNNmNNNmGUUGmUmAmGmC
UCCCmUmUmCmGmAmAmAmGmAmCmCGUUmGmCUAmCAAU*AAGmGmCCmG
mUmCmGmAmAmAmGmAmUGUGCmCGmCAAmCGmCmUmCmUmGmCCmUmUmC
mUGGCAUCG*mU*mU;
or
(SEQ ID NO: 522)
mN*mN*mN*mNmNNNmNmNNmNNmNNNNNmNNNNmNNNmGUUGmUmAmGmC
UCCCmUmUmCmGmAmAmAmGmAmCmCGUUmGmCUAmCAAUAAGmGmCCmGm
UmCmGmAmAmAmGmAmUGUGCmCGmCAAmCGmCmUmCmUmGmCCmUmUmCm
UGGCAUCG*mU*mU;
(SEQ ID NO: 523)
(N)₂₀₋₂₅
mGUUGmUmAmGmCUCCCmUmGmAmAmAmCmCGUUmGmCUAmCAAUAAGmGm
CCmGmUmCmGmAmAmAmGmAmUGUGCmCGCmAmAmCmGmCmUmCmUmGmCC
mUmUmCmUGmGCmAmUC*mG*mU*mU;
or
(SEQ ID NO: 524)
(N)₂₀₋₂₅
mGUUGmUmAmGmCUCCCmUmUmCmGmAmAmAmGmAmCmCGUUmGmCUAmCA
AUAAGmGmCCmGmUmCmGmAmAmAmGmAmUGUGCmCGmCAAmCGmCmUmCm
UmGmCCmUmUmCmUGGCAUCG*mU*mU,

wherein N represents a nucleotide having any base, e.g., A, C, G, or U. (mN*)₃ represents three consecutive nucleotides each having any base, a 2′-OMe, and a 3′ PS linkage to the next nucleotide, respectively. Nucleotide modifications are indicated as m is 2′-OMe modification and * is a PS linkage. In the context of a modified nucleotide sequence, in certain embodiments, N, A, C, G, and U are unmodified RNA nucleotides, i.e., 2′-OH and phosphodiesterase linkage to the 3′ nucleotide.

[0414] The shortened NmeCas9 gRNA may comprise internal linkers disclosed herein.

[0415] “Internal linker” as used herein describes a non-nucleotide segment joining two nucleotides within a guide RNA. If the gRNA contains a spacer region, the internal linker is located outside of the spacer region (e.g., in the scaffold or conserved region of the gRNA). For Type V guides, it is understood that the last hairpin is the only hairpin in the structure, i.e., the repeat-anti-repeat region. In some embodiments, the internal linker comprises a PEG-linker disclosed herein. In some embodiments, the internal linker comprises a PEG-linker disclosed herein.

[0416] In some embodiments, the single guide RNA comprises a guide region and a conserved region, wherein the conserved region comprises one or more of:
[0417] (a) a shortened repeat/anti-repeat region, wherein the shortened repeat/anti-repeat region lacks 2-24 nucleotides, wherein
   [0418] (i) one or more of nucleotides 37-64 is deleted and optionally substituted relative to SEQ ID NO: 500; and
   [0419] (ii) nucleotide 36 is linked to nucleotide 65 by (i) a first internal linker that alone or in combination with nucleotides substitutes for 4 nucleotides, or (ii) at least 4 nucleotides; or
[0420] (b) a shortened hairpin 1 region, wherein the shortened hairpin 1 lacks 2-10, optionally 2-8 nucleotides, wherein
   [0421] (i) one or more of nucleotides 82-95 is deleted and optionally substituted relative to SEQ ID NO: 500; and
   [0422] (ii) nucleotide 81 is linked to nucleotide 96 by (i) a second internal linker that alone or in combination with nucleotides substitutes for 4 nucleotides, or (ii) at least 4 nucleotides; or
[0423] (c) a shortened hairpin 2 region, wherein the shortened hairpin 2 lacks 2-18, optionally 2-16 nucleotides, wherein
   [0424] (i) one or more of nucleotides 113-134 is deleted and optionally substituted relative to SEQ ID NO: 500; and
   [0425] (ii) nucleotide 112 is linked to nucleotide 135 by (i) a third internal linker that alone or in combination with nucleotides substitutes for 4 nucleotides, or (ii) at least 4 nucleotides;
[0426] wherein one or both nucleotides 144-145 are optionally deleted as compared to SEQ ID NO: 500;
[0427] wherein the gRNA comprises at least one of the first internal linker, the second internal linker, and the third internal linker.

[0428] Exemplary locations of the linkers are as shown in the following: (N)₂₀₋₂₅GUUGUAGCUCCCUUC(L1)GACCGUUGCUACAAUAAGGCCGUC(L1)GAUGU GCCGCAACGCUCUGCC(L1)GGCAUCGUU (SEQ ID NO: 506). As used herein, (L1) refers to an internal linker having a bridging length of about 15-21 atoms.

[0429] In some embodiments, the shortened NmeCas9 guide RNA comprising internal linkers may be chemically modified. Exemplary modifications include a modification pattern of the following sequence:

(SEQ ID NO: 507)
mN*mN*mN*mNmNNNmNmNNmNNmNNNNNmNNNNmNNNmGUUGmUmAmGmC
UCCCmUmUmC(L1)mGmAmCmCGUUmGmCUAmCAAU*AAGmGmCCmGmUmC
(L1)mGmAmUGUGCmCGmCAAmCGCUCUmGmCC(L1)GGCAUCG*mU*mU.

[0430] In some embodiments, the sgRNA comprises the modification pattern shown in SEQ ID NOs: 141 and 143-150 (Nine PEG guides), where N is any natural or non-natural nucleotide, and where the totality of the N's comprises a guide sequence.

### IV. Delivery

[0431] In some embodiments, a polynucleotide or a composition disclosed herein is formulated in or administered via a lipid nanoparticle; see, e.g., WO2017173054, the contents of which are hereby incorporated by reference in their entirety.

### Lipids

[0432] Disclosed herein are various embodiments using lipid nucleic acid assembly compositions comprising nucleic acids(s), or composition(s) described herein. In some embodiments, the lipid nucleic acid assembly composition comprises a nucleic acid (e.g., mRNA) comprising an open reading frame encoding polynucleotide comprising an open reading frame (ORF), the ORF comprising a nucleotide sequence encoding a C-terminal N. meningitidis (Nine) Cas9 polypeptide disclosed herein and a nucleotide sequence encoding a first nuclear localization signal (NLS). In some embodiments, the NmeCas9 is an Nme2Cas9, an Nme1Cas9, or Nme3Cas9.

[0433] As used herein, a “lipid nucleic acid assembly composition” refers to lipid-based delivery compositions, including lipid nanoparticles (LNPs) and lipoplexes. LNP refers to lipid nanoparticles<100 nM. LNPs are formed by precise mixing a lipid component (e.g. in ethanol) with an aqueous nucleic acid component and LNPs are uniform in size. Lipoplexes are particles formed by bulk mixing the lipid and nucleic acid components and are between about 100 nm and 1 micron in size. In certain embodiments the lipid nucleic acid assemblies are LNPs. As used herein, a “lipid nucleic acid assembly” comprises a plurality of (i.e., more than one) lipid molecules physically associated with each other by intermolecular forces. A lipid nucleic acid assembly may comprise a bioavailable lipid having a pKa value of <7.5 or <7. The lipid nucleic acid assemblies are formed by mixing an aqueous nucleic acid-containing solution with an organic solvent-based lipid solution, e.g., 100% ethanol. Suitable solutions or solvents include or may contain: water, PBS, Tris buffer, NaCl, citrate buffer, ethanol, chloroform, diethyl ether, cyclohexane, tetrahydrofuran, methanol, isopropanol. A pharmaceutically acceptable buffer may optionally be comprised in a pharmaceutical formulation comprising the lipid nucleic acid assemblies, e.g., for an ex vivo therapy. In some embodiments, the aqueous solution comprises an RNA, such as an mRNA or a gRNA. In some embodiments, the aqueous solution comprises an mRNA encoding an RNA-guided DNA binding agent, such as Cas9.

[0434] As used herein, lipid nanoparticle (LNP) refers to a particle that comprises a plurality of (i.e., more than one) lipid molecules physically associated with each other by intermolecular forces. The LNPs may be, e.g., microspheres (including unilamellar and multilamellar vesicles, e.g., “liposomes”—lamellar phase lipid bilayers that, in some embodiments, are substantially spherical—and, in more particular embodiments, can comprise an aqueous core, e.g., comprising a substantial portion of RNA molecules), a dispersed phase in an emulsion, micelles, or an internal phase in a suspension. Emulsions, micelles, and suspensions may be suitable compositions for local and/or topical delivery. See also, e.g., WO2017173054A1, the contents of which are hereby incorporated by reference in their entirety. Any LNP known to those of skill in the art to be capable of delivering nucleotides to subjects may be utilized with the guide RNAs and the nucleic acid encoding a NmeCas9 and an NLS described herein.

[0435] In some embodiments, the aqueous solution comprises a nucleic acid encoding a polypeptide comprising an A3A and an RNA-guided nickase. A pharmaceutical formulation comprising the lipid nucleic acid assembly composition may optionally comprise a pharmaceutically acceptable buffer.

[0436] In some embodiments, the lipid nucleic acid assembly compositions include an “amine lipid” (sometimes herein or elsewhere described as an “ionizable lipid” or a “biodegradable lipid”), together with an optional “helper lipid”, a “neutral lipid”, and a stealth lipid such as a PEG lipid. In some embodiments, the amine lipids or ionizable lipids are cationic depending on the pH.

### 1. Amine Lipids

[0437] In some embodiments, lipid nucleic acid assembly compositions comprise an “amine lipid”, which is, for example an ionizable lipid such as Lipid A or its equivalents, including acetal analogs of Lipid A.

[0438] In some embodiments, the amine lipid is Lipid A, which is (9Z,12Z)-3-((4,4-bis(octyloxy)butanoyl)oxy)-2-((((3-(diethylamino)propoxy)carbonyl)oxy)methyl)propyl octadeca-9,12-dienoate, also called 3-((4,4-bis(octyloxy)butanoyl)oxy)-2-((((3-(diethylamino)propoxy)carbonyl)oxy)methyl)propyl (9Z,12Z)-octadeca-9,12-dienoate. Lipid A can be depicted as:

[chemical structure]

[0439] Lipid A may be synthesized according to WO2015/095340 (e.g., pp. 84-86). In some embodiments, the amine lipid is an equivalent to Lipid A.

[0440] In some embodiments, an amine lipid is an analog of Lipid A. In some embodiments, a Lipid A analog is an acetal analog of Lipid A. In particular lipid nucleic acid assembly compositions, the acetal analog is a C4-C12 acetal analog. In some embodiments, the acetal analog is a C5-C12 acetal analog. In additional embodiments, the acetal analog is a C5-C10 acetal analog. In further embodiments, the acetal analog is chosen from a C4, C5, C6, C7, C9, C10, C11, and C12 acetal analog.

[0441] Amine lipids and other “biodegradable lipids” suitable for use in the lipid nucleic acid assemblies described herein are biodegradable in vivo or ex vivo. The amine lipids have low toxicity (e.g., are tolerated in animal models without adverse effect in amounts of greater than or equal to 10 mg/kg). In some embodiments, lipid nucleic acid assemblies comprising an amine lipid include those where at least 75% of the amine lipid is cleared from the plasma or the engineered cell within 8, 10, 12, 24, or 48 hours, or 3, 4, 5, 6, 7, or 10 days. In some embodiments, lipid nucleic acid assemblies comprising an amine lipid include those where at least 50% of the nucleic acid, e.g., mRNA or gRNA, is cleared from the plasma within 8, 10, 12, 24, or 48 hours, or 3, 4, 5, 6, 7, or 10 days. In some embodiments, lipid nucleic acid assemblies comprising an amine lipid include those where at least 50% of the lipid nucleic acid assembly is cleared from the plasma within 8, 10, 12, 24, or 48 hours, or 3, 4, 5, 6, 7, or 10 days, for example by measuring a lipid (e.g., an amine lipid), nucleic acid, e.g., RNA/mRNA, or other component. In some embodiments, lipid-encapsulated versus free lipid, RNA, or nucleic acid component of the lipid nucleic acid assembly is measured.

[0442] Biodegradable lipids include, for example the biodegradable lipids of WO/2020/219876, WO/2020/118041, WO/2020/072605, WO/2019/067992, WO/2017/173054, WO2015/095340, and WO2014/136086, and LNPs include LNP compositions described therein, the lipids and compositions of which are hereby incorporated by reference.

[0443] Lipid clearance may be measured as described in literature. See Maier, M. A., et al. Biodegradable Lipids Enabling Rapidly Eliminated Lipid Nanoparticles for Systemic Delivery of RNAi Therapeutics. Mol. Ther. 2013, 21(8), 1570-78 (“Maier”). For example, in Maier, LNP-siRNA systems containing luciferases-targeting siRNA were administered to six- to eight-week-old male C57Bl/6 mice at 0.3 mg/kg by intravenous bolus injection via the lateral tail vein. Blood, liver, and spleen samples were collected at 0.083, 0.25, 0.5, 1, 2, 4, 8, 24, 48, 96, and 168 hours post-dose. Mice were perfused with saline before tissue collection and blood samples were processed to obtain plasma. All samples were processed and analyzed by LC-MS. Further, Maier describes a procedure for assessing toxicity after administration of LNP-siRNA formulations. For example, a luciferase-targeting siRNA was administered at 0, 1, 3, 5, and 10 mg/kg (5 animals/group) via single intravenous bolus injection at a dose volume of 5 mL/kg to male Sprague-Dawley rats. After 24 hours, about 1 mL of blood was obtained from the jugular vein of conscious animals and the serum was isolated. At 72 hours post-dose, all animals were euthanized for necropsy. Assessments of clinical signs, body weight, serum chemistry, organ weights and histopathology were performed. Although Maier describes methods for assessing siRNA-LNP formulations, these methods may be applied to assess clearance, pharmacokinetics, and toxicity of administration of lipid nucleic acid assembly compositions of the present disclosure.

[0444] Ionizable and bioavailable lipids for LNP delivery of nucleic acids known in the art are suitable. Lipids may be ionizable depending upon the pH of the medium they are in. For example, in a slightly acidic medium, the lipid, such as an amine lipid, may be protonated and thus bear a positive charge. Conversely, in a slightly basic medium, such as, for example, blood where pH is approximately 7.35, the lipid, such as an amine lipid, may not be protonated and thus bear no charge.

[0445] The ability of a lipid to bear a charge is related to its intrinsic pKa. In some embodiments, the amine lipids of the present disclosure may each, independently, have a pKa in the range of from about 5.1 to about 7.4. In some embodiments, the bioavailable lipids of the present disclosure may each, independently, have a pKa in the range of from about 5.1 to about 7.4, such as from about 5.5 to about 6.6, from about 5.6 to about 6.4, from about 5.8 to about 6.2, or from about 5.8 to about 6.5. For example, the amine lipids of the present disclosure may each, independently, have a pKa in the range of from about 5.8 to about 6.5. Lipids with a pKa ranging from about 5.1 to about 7.4 are effective for delivery of cargo in vivo, e.g., to the liver. Further, it has been found that lipids with a pKa ranging from about 5.3 to about 6.4 are effective for delivery in vivo, e.g., to tumors. See, e.g., WO2014/136086.

### 2. Additional Lipids

[0446] “Neutral lipids” suitable for use in a lipid nucleic acid assembly composition of the disclosure include, for example, a variety of neutral, uncharged or zwitterionic lipids. Examples of neutral phospholipids suitable for use in the present disclosure include, but are not limited to, 5-heptadecylbenzene-1,3-diol (resorcinol), dipalmitoylphosphatidylcholine (DPPC), distearoylphosphatidylcholine, e.g., 1,2-distearoyl-sn-glycero-3-phosphocholine (DSPC), pohsphocholine (DOPC), dimyristoylphosphatidylcholine (DMPC), phosphatidylcholine (PLPC), 1,2-distearoyl-sn-glycero-3-phosphocholine (DAPC), phosphatidylethanolamine (PE), egg phosphatidylcholine (EPC), dilauryloylphosphatidylcholine (DLPC), dimyristoylphosphatidylcholine (DMPC), 1-myristoyl-2-palmitoyl phosphatidylcholine (MPPC), 1-palmitoyl-2-myristoyl phosphatidylcholine (PMPC), 1-palmitoyl-2-stearoyl phosphatidylcholine (PSPC), 1,2-diarachidoyl-sn-glycero-3-phosphocholine (DBPC), 1-stearoyl-2-palmitoyl phosphatidylcholine (SPPC), 1,2-dieicosenoyl-sn-glycero-3-phosphocholine (DEPC), palmitoyloleoyl phosphatidylcholine (POPC), lysophosphatidyl choline, dioleoyl phosphatidylethanolamine (DOPE), dilinoleoylphosphatidylcholine distearoylphosphatidylethanolamine (DSPE), dimyristoyl phosphatidylethanolamine (DMPE), dipalmitoyl phosphatidylethanolamine (DPPE), palmitoyloleoyl phosphatidylethanolamine (POPE), lysophosphatidylethanolamine and combinations thereof. In one embodiment, the neutral phospholipid may be selected from the group consisting of distearoylphosphatidylcholine (DSPC) and dimyristoyl phosphatidyl ethanolamine (DMPE). In another embodiment, the neutral phospholipid may be distearoylphosphatidylcholine (DSPC).

[0447] “Helper lipids” include steroids, sterols, and alkyl resorcinols. Helper lipids suitable for use in the present disclosure include, but are not limited to, cholesterol, 5-heptadecylresorcinol, and cholesterol hemisuccinate. In one embodiment, the helper lipid may be cholesterol. In one embodiment, the helper lipid may be cholesterol hemisuccinate.

[0448] “Stealth lipids” are lipids that alter the length of time the nanoparticles can exist in vivo (e.g., in the blood). Stealth lipids may assist in the formulation process by, for example, reducing particle aggregation and controlling particle size. Stealth lipids used herein may modulate pharmacokinetic properties of the lipid nucleic acid assembly or aid in stability of the nanoparticle ex vivo. Stealth lipids suitable for use in a lipid nucleic acid assembly composition of the disclosure include, but are not limited to, stealth lipids having a hydrophilic head group linked to a lipid moiety. Stealth lipids suitable for use in a lipid nucleic acid assembly composition of the present disclosure and information about the biochemistry of such lipids can be found in Romberg et al., Pharmaceutical Research, Vol. 25, No. 1, 2008, pg. 55-71 and Hoekstra et al., Biochimica et Biophysica Acta 1660 (2004) 41-52. Additional suitable PEG lipids are disclosed, e.g., in WO 2006/007712.

[0449] In one embodiment, the hydrophilic head group of stealth lipid comprises a polymer moiety selected from polymers based on PEG. Stealth lipids may comprise a lipid moiety. In some embodiments, the stealth lipid is a PEG lipid.

[0450] In one embodiment, a stealth lipid comprises a polymer moiety selected from polymers based on PEG (sometimes referred to as poly(ethylene oxide)), poly(oxazoline), poly(vinyl alcohol), poly(glycerol), poly(N-vinylpyrrolidone), polyaminoacids and poly[N-(2-hydroxypropyl)methacrylamide].

[0451] In one embodiment, the PEG lipid comprises a polymer moiety based on PEG (sometimes referred to as poly(ethylene oxide)).

[0452] The PEG lipid further comprises a lipid moiety. In some embodiments, the lipid moiety may be derived from diacylglycerol or diacylglycamide, including those comprising a dialkylglycerol or dialkylglycamide group having alkyl chain length independently comprising from about C4 to about C40 saturated or unsaturated carbon atoms, wherein the chain may comprise one or more functional groups such as, for example, an amide or ester. In some embodiments, the alkyl chain length comprises about C10 to C20. The dialkylglycerol or dialkylglycamide group can further comprise one or more substituted alkyl groups. The chain lengths may be symmetrical or asymmetrical.

[0453] Unless otherwise indicated, the term “PEG” as used herein means any polyethylene glycol or other polyalkylene ether polymer. In one embodiment, PEG is an optionally substituted linear or branched polymer of ethylene glycol or ethylene oxide. In one embodiment, PEG is unsubstituted. In one embodiment, the PEG is substituted, e.g., by one or more alkyl, alkoxy, acyl, hydroxy, or aryl groups. In one embodiment, the term includes PEG copolymers such as PEG-polyurethane or PEG-polypropylene (see, e.g., J. Milton Harris, Poly(ethylene glycol) chemistry: biotechnical and biomedical applications (1992)); in another embodiment, the term does not include PEG copolymers. In one embodiment, the PEG has a molecular weight of from about 130 to about 50,000, in a sub-embodiment, about 150 to about 30,000, in a sub-embodiment, about 150 to about 20,000, in a sub-embodiment about 150 to about 15,000, in a sub-embodiment, about 150 to about 10,000, in a sub-embodiment, about 150 to about 6,000, in a sub-embodiment, about 150 to about 5,000, in a sub-embodiment, about 150 to about 4,000, in a sub-embodiment, about 150 to about 3,000, in a sub-embodiment, about 300 to about 3,000, in a sub-embodiment, about 1,000 to about 3,000, and in a sub-embodiment, about 1,500 to about 2,500.

[0454] In some embodiments, the PEG (e.g., conjugated to a lipid moiety or lipid, such as a stealth lipid), is a “PEG-2K,” also termed “PEG 2000,” which has an average molecular weight of about 2,000 Daltons. PEG-2K is represented herein by the following formula (I), wherein n is 45, meaning that the number averaged degree of polymerization comprises about 45 subunits

[chemical structure]

However, other PEG embodiments known in the art may be used, including, e.g., those where the number-averaged degree of polymerization comprises about 23 subunits (n=23), and/or 68 subunits (n=68). In some embodiments, n may range from about 30 to about 60. In some embodiments, n may range from about 35 to about 55. In some embodiments, n may range from about 40 to about 50. In some embodiments, n may range from about 42 to about 48. In some embodiments, n may be 45. In some embodiments, R may be selected from H, substituted alkyl, and unsubstituted alkyl. In some embodiments, R may be unsubstituted alkyl. In some embodiments, R may be methyl.

[0455] In any of the embodiments described herein, the PEG lipid may be selected from PEG-dilauroylglycerol, PEG-dimyristoylglycerol (e.g., 1,2-dimyristoyl-rac-glycero-3-methylpolyoxyethylene glycol 2000 (PEG2k-DMG) or PEG-DMG (catalog #GM-020 from NOF, Tokyo, Japan), PEG-dipalmitoylglycerol, PEG-distearoylglycerol (PEG-DSPE) (catalog #DSPE-020CN, NOF, Tokyo, Japan), PEG-dilaurylglycamide, PEG-dimyristylglycamide, PEG-dipalmitoylglycamide, and PEG-distearoylglycamide, PEG-cholesterol (1-[8′-(Cholest-5-en-3[beta]-oxy)carboxamido-3′,6′-dioxaoctanyl]carbamoyl-[omega]-methyl-poly(ethylene glycol), PEG-DMB (3,4-ditetradecoxylbenzyl-[omega]-methyl-poly(ethylene glycol)ether), 1,2-dimyristoyl-sn-glycero-3-phosphoethanolamine-N-[methoxy(polyethylene glycol)-2000] (PEG2k-DMG) (cat. #880150P from Avanti Polar Lipids, Alabaster, Alabama, USA), 1,2-distearoyl-sn-glycero-3-phosphoethanolamine-N-[methoxy(polyethylene glycol)-2000] (PEG2k-DSPE) (cat. #880120C from Avanti Polar Lipids, Alabaster, Alabama, USA), 1,2-distearoyl-sn-glycerol, methoxypolyethylene glycol (PEG2k-DSG; GS-020, NOF Tokyo, Japan), poly(ethylene glycol)-2000-dimethacrylate (PEG2k-DMA), and 1,2-distearyloxypropyl-3-amine-N-[methoxy(polyethylene glycol)-2000] (PEG2k-DSA). In one embodiment, the PEG lipid may be 1,2-dimyristoyl-rac-glycero-3-methylpolyoxyethylene glycol 2000 (PEG2k-DMG). In one embodiment, the PEG lipid may be PEG2k-DMG. In one embodiment, the PEG lipid may be PEG2k-DMG. In some embodiments, the PEG lipid may be PEG2k-DSG. In one embodiment, the PEG lipid may be PEG2k-DSPE. In one embodiment, the PEG lipid may be PEG2k-DMA. In one embodiment, the PEG lipid may be PEG2k-C-DMA. In one embodiment, the PEG lipid may be compound S027, disclosed in WO2016/010840 (paragraphs [00240] to [00244]). In one embodiment, the PEG lipid may be PEG2k-DSA. In one embodiment, the PEG lipid may be PEG2k-C11. In some embodiments, the PEG lipid may be PEG2k-C14. In some embodiments, the PEG lipid may be PEG2k-C16. In some embodiments, the PEG lipid may be PEG2k-C18.

[0456] In preferred embodiments, the PEG lipid includes a glycerol group. In preferred embodiments, the PEG lipid includes a dimyristoylglycerol (DMG) group. In preferred embodiments, the PEG lipid comprises PEG-2k. In preferred embodiments, the PEG lipid is a PEG-DMG. In preferred embodiments, the PEG lipid is a PEG-2k-DMG. In preferred embodiments, the PEG lipid is 1,2-dimyristoyl-rac-glycero-3-methoxypolyethylene glycol2000. In preferred embodiments, the PEG-2k-DMG is 1,2-dimyristoyl-rac-glycero-3-methoxypolyethylene glycol-2000.

### LNP

[0457] Lipid nanoparticles (LNPs) are a well-known means for delivery of nucleotide and protein cargo, and may be used for delivery of the polynucleotide, compositions, or pharmaceutical formulations disclosed herein. In some embodiments, the LNPs deliver nucleic acid, protein, or nucleic acid together with protein.

[0458] As used herein, lipid nanoparticle (LNP) refers to a particle that comprises a plurality of (i.e., more than one) lipid molecules physically associated with each other by intermolecular forces. The LNPs may be, e.g., microspheres (including unilamellar and multilamellar vesicles, e.g., “liposomes”—lamellar phase lipid bilayers that, in some embodiments, are substantially spherical and, in more particular embodiments, can comprise an aqueous core, e.g., comprising a substantial portion of RNA molecules), a dispersed phase in an emulsion, micelles, or an internal phase in a suspension (see, e.g., WO2017173054, the contents of which are hereby incorporated by reference in their entirety). Any LNP known to those of skill in the art to be capable of delivering nucleotides to subjects may be utilized.

[0459] In some embodiments, the LNPs comprise cationic lipids. In some embodiments, the LNPs comprise (9Z,12Z)-3-((4,4-bis(octyloxy)butanoyl)oxy)-2-((((3-(diethylamino)propoxy)carbonyl)oxy)methyl)propyl octadeca-9,12-dienoate, also called 3-((4,4-bis(octyloxy)butanoyl)oxy)-2-((((3-(diethylamino)propoxy)carbonyl)oxy)methyl)propyl (9Z,12Z)-octadeca-9,12-dienoate), referred to herein as Lipid A. In some embodiments, the LNPs comprise molar ratios of a cationic lipid amine to RNA phosphate (N:P) of about 4.5. In some embodiments, the LNPs comprise is nonyl 8-((7,7-bis(octyloxy)heptyl)(2-hydroxyethyl)amino)octanoate. In some embodiments, the LNPs comprise molar ratios of a cationic lipid amine to RNA phosphate (N:P) of about 4.5-6.5. In some embodiments, the LNPs comprise molar ratios of a cationic lipid amine to RNA phosphate (N:P) of about 4.5. In some embodiments, the LNPs comprise molar ratios of a cationic lipid amine to RNA phosphate (N:P) of about 6.0.

[0460] In some embodiments, the present disclosure comprises a method for delivering a polynucleotide or a composition disclosed herein to a subject, wherein the polynucleotide is associated with an LNP. In some embodiments, the present disclosure comprises a method for delivering a first polynucleotide and a second polynucleotide, or a composition for delivering a first polynucleotide and a second polynucleotide to a subject, wherein the first polynucleotide and the second polynucleotide are associated with the same LNP, e.g., co-formulated with the same LNP. In In some embodiments, the present disclosure comprises a method for delivering a first polynucleotide and a second polynucleotide, or a composition for delivering a first polynucleotide and a second polynucleotide to a subject, wherein the first polynucleotide and the second polynucleotide are each associated with a separate LNP, e.g., each polynucleotide is associated with a separate LNP for administration to a subject or use together, e.g., for co-administration. In some embodiments, the first polynucleotide and the second polynucleotide encode an NmeCas9 nickase and a UGI In some embodiments, the composition further comprises one or more guide RNA. In some embodiments, the method further comprises delivering one or more guide RNA.

[0461] In some embodiments, provided herein is a method for delivering any of the polynucleotide or composition described herein to a cell or a population of cells or a subject, including to a cell or population of cells in a subject in vivo, wherein any one or more of the components is associated with an LNP. In some embodiments, the composition further comprises one or more guide RNAs. In some embodiments, the method further comprises delivering one or more guide RNAs.

[0462] In some embodiments, provided herein is a composition comprising any of the polynucleotide or composition described herein or donor construct disclosed herein, alone or in combination, with an LNP. In some embodiments, the composition further comprises one or more guide RNAs. In some embodiments, the method further comprises delivering one or more guide RNAs.

[0463] In some embodiments, LNPs associated with the polynucleotide or composition disclosed herein are for use in preparing a medicament for treating a disease or disorder.

[0464] In some embodiments, a method of modifying a target gene is provided, the method comprising delivering to the cell one or more lipid nucleic acid assembly compositions, optionally lipid nanoparticles, comprising the polynucleotide disclosed herein, and one or more guide RNAs.

[0465] In some embodiments, at least one lipid nucleic acid assembly composition comprises lipid nanoparticle (LNPs), optionally wherein all lipid nucleic acid assembly compositions comprise LNPs. In some embodiments, at least one lipid nucleic acid assembly composition is a lipoplex composition. In some embodiments, the lipid nucleic acid assembly composition comprises an ionizable lipid.

[0466] Electroporation is a well-known means for delivery of cargo, and any electroporation methodology may be used for delivery of a polynucleotide or composition disclosed herein. In some embodiments, electroporation may be used to deliver any one of the a polynucleotide or a composition disclosed herein.

[0467] In some embodiments, the present disclosure comprises a method for delivering a polynucleotide, polypeptide, or a composition disclosed herein to an ex vivo cell, wherein the polynucleotide or composition is associated with an LNP or not associated with an LNP. In some embodiments, the LNP is also associated with one or more guide RNAs. See, e.g., PCT/US2021/029446, incorporated herein by reference

[0468] In some embodiments, a kit comprising a polynucleotide, a polypeptide, or a composition disclosed herein is provided.

[0469] In some embodiments, a pharmaceutical formulation comprising a polynucleotide, polypeptide, or a composition disclosed herein is provided. A pharmaceutical formulation can further comprise a pharmaceutically acceptable carrier, e.g., water or a buffer. A pharmaceutical formulation can further comprise one or more pharmaceutically acceptable excipients, such as a stabilizer, preservative, bulking agent, or the like. A pharmaceutical formulation can further comprise one or more pharmaceutically acceptable salts, such as sodium chloride. In some embodiments, the pharmaceutical formulation is formulated for intravenous administration. In some embodiments, pharmaceutical formulations are non-pyrogenic. In some embodiments, pharmaceutical formulations are sterile, especially for pharmaceutical formulations that are for injection or infusion.

### V. Exemplary Uses, Methods, And Treatments

[0470] In some embodiments, a polynucleotide, expression construct, composition, lipid nanoparticle (LNP), or pharmaceutical composition disclosed herein is for use in gene therapy, e.g., of a target gene.

[0471] In some embodiments, use of the polynucleotide, composition, or polypeptide of disclosed herein in modifying a target gene in a cell is provided.

[0472] In some embodiments, use of the polynucleotide, composition, or polypeptide of disclosed herein in the manufacture of a medicament for modifying a target gene in a cell is provided.

[0473] In some embodiments, the polynucleotide or composition is formulated as a lipid nucleic acid assembly composition, optionally a lipid nanoparticle.

[0474] In some embodiments, a method of modifying a target gene is provided the method comprising delivering to a cell the polynucleotide, polypeptide, or composition disclosed herein.

[0475] In some embodiments, a polynucleotide, expression construct, composition, lipid nanoparticle (LNP), or pharmaceutical composition is for use in genome editing, e.g., editing a target gene wherein the polynucleotide encodes an RNA-guided DNA binding agent (e.g., NmeCas9).

[0476] In some embodiments, a polynucleotide, expression construct, composition, lipid nanoparticle (LNP), or pharmaceutical composition disclosed herein encoding a polypeptide disclosed herein is for use in expressing the polypeptide in a heterologous cell, e.g., a human cell or a mouse cell.

[0477] In some embodiments, a polynucleotide, expression construct, composition, lipid nanoparticle (LNP), or pharmaceutical composition is for use in modifying a target gene, e.g., altering its sequence or epigenetic status wherein the polynucleotide encodes an RNA-guided DNA binding agent (e.g., NmeCas9).

[0478] In some embodiments, a polynucleotide, expression construct, composition, lipid nanoparticle (LNP), or pharmaceutical composition is for use in inducing a double-stranded break (DSB) within a target gene. In some embodiments, a polynucleotide, expression construct, composition, lipid nanoparticle (LNP), or pharmaceutical composition is for use in inducing an indel within a target gene. In some embodiments, the use of a polynucleotide, expression construct, composition, lipid nanoparticle (LNP), or pharmaceutical composition disclosed herein is provided for the preparation of a medicament for genome editing, e.g., editing a target gene wherein the polynucleotide encodes an RNA-guided DNA binding agent (e.g., NmeCas9). In some embodiments, the use of a polynucleotide, expression construct, composition, lipid nanoparticle (LNP), or pharmaceutical composition disclosed herein encoding a polypeptide disclosed herein is provided for the preparation of a medicament for expressing the polypeptide in a heterologous cell or increasing the expression of the polypeptide, e.g., a human cell or a mouse cell. In some embodiments, the use of a polynucleotide, expression construct, composition, lipid nanoparticle (LNP), or pharmaceutical composition disclosed herein is provided for the preparation of a medicament for modifying a target gene, e.g., altering its sequence or epigenetic status. In some embodiments, the use of a polynucleotide, expression construct, composition, lipid nanoparticle (LNP), or pharmaceutical composition disclosed herein is provided for the preparation of a medicament for inducing a double-stranded break (DSB) within a target gene. In some embodiments, the use of a polynucleotide, expression construct, composition, lipid nanoparticle (LNP), or pharmaceutical composition disclosed herein is provided for the preparation of a medicament for inducing an indel within a target gene.

[0479] In some embodiments, the target gene is a transgene. In some embodiments, the target gene is an endogenous gene. The target gene may be in a subject, such as a mammal, such as a human. In some embodiments, the target gene is in an organ, such as a liver, such as a mammalian liver, such as a human liver. In some embodiments, the target gene is in a liver cell, such as a mammalian liver cell, such as a human liver cell. In some embodiments, the target gene is in a hepatocyte, such as a mammalian hepatocyte, such as a human hepatocyte. In some embodiments, the liver cell or hepatocyte is in situ. In some embodiments, the liver cell or hepatocyte is isolated, e.g., in a culture, such as in a primary culture. In some embodiments, the target cell is a peripheral blood mononuclear cell (PBMC), such as a mammalian PBMC, such as a human PBMC. In some embodiments, the PBMC is an immune cell, e.g., a T cell, a B cell, an NK cell. In some embodiments, the cell is a pluripotent cell, such as a mammalian pluripotent cell, such as a human pluripotent cell. In some embodiments, the target cell is a stem cell, such as a mammalian stem cell, such as a human stem cell. In some embodiments, the stem cell is present in bone marrow. In some embodiments, the stem cell is an induced pluripotent stem cell (iPCS). In some embodiments, the cells are isolated, e.g., in culture ex vivo.

[0480] Also provided are methods corresponding to the uses disclosed herein, which comprise administering the polynucleotide, expression construct, composition, lipid nanoparticle (LNP), or pharmaceutical composition disclosed herein to a subject or contacting a cell such as those described above with the polynucleotide, LNP, or pharmaceutical composition disclosed herein, e.g., to express a polypeptide disclosed herein or increase the expression of a polypeptide disclosed herein, e.g., in a heterologous cell, such as a human cell or a mouse cell.

[0481] In any of the foregoing embodiments involving a subject, the subject can be a mammal. In any of the foregoing embodiments involving a subject, the subject can be human.

[0482] In some embodiments, a polynucleotide, expression construct, composition, lipid nanoparticle (LNP), or pharmaceutical composition disclosed herein is administered intravenously or for intravenous administration.

[0483] In some embodiments, a single administration of a polynucleotide, LNP, or pharmaceutical composition disclosed herein is sufficient to knock down expression of the target gene product. In some embodiments, a single administration of a polynucleotide, LNP, or pharmaceutical composition disclosed herein is sufficient to knock out expression of the target gene product. In other embodiments, more than one administration of a polynucleotide, LNP, or pharmaceutical composition disclosed herein may be beneficial to maximize editing, modification, indel formation, DSB formation, or the like via cumulative effects.

### VI. Exemplary DNA Molecules, Vectors, Expression Constructs, Host Cells, and Production Methods

[0484] In certain embodiments, the present disclosure provides a DNA molecule comprising an ORF sequence encoding a polypeptide disclosed herein. In some embodiments, in addition to the ORF sequence, the DNA molecule further comprises nucleic acids that do not encode the polypeptide disclosed herein. Nucleic acids that do not encode the polypeptide include, but are not limited to, promoters, enhancers, regulatory sequences, and nucleic acids encoding a guide RNA.

[0485] In some embodiments, the DNA molecule further comprises a nucleotide sequence encoding a crRNA, a trRNA, or a crRNA and trRNA. In some embodiments, the nucleotide sequence encoding the crRNA, trRNA, or crRNA and trRNA comprises or consists of a guide sequence flanked by all or a portion of a repeat sequence from a naturally occurring CRISPR/Cas system. The nucleic acid comprising or consisting of the crRNA, trRNA, or crRNA and trRNA may further comprise a vector sequence wherein the vector sequence comprises or consists of nucleic acids that are not naturally found together with the crRNA, trRNA, or crRNA and trRNA. In some embodiments, the crRNA and the trRNA are encoded by non-contiguous nucleic acids within one vector. In other embodiments, the crRNA and the trRNA may be encoded by a contiguous nucleic acid. In some embodiments, the crRNA and the trRNA are encoded by opposite strands of a single nucleic acid. In other embodiments, the crRNA and the trRNA are encoded by the same strand of a single nucleic acid.

[0486] In some embodiments, the DNA molecule further comprises a promoter operably linked to the sequence encoding any of the ORF encoding a polypeptide disclosed herein. In some embodiments, the DNA molecule is an expression construct suitable for expression in a mammalian cell, e.g., a human cell or a mouse cell, such as a human hepatocyte or a rodent (e.g., mouse) hepatocyte. In some embodiments, the DNA molecule is an expression construct suitable for expression in a cell of a mammalian organ, e.g., a human liver or a rodent (e.g., mouse) liver. In some embodiments, the DNA molecule is a plasmid or an episome. In some embodiments, the DNA molecule is contained in a host cell, such as a bacterium or a cultured eukaryotic cell. Exemplary bacteria include proteobacteria such as E. coli. Exemplary cultured eukaryotic cells include primary hepatocytes, including hepatocytes of rodent (e.g., mouse) or human origin; hepatocyte cell lines, including hepatocytes of rodent (e.g., mouse) or human origin; human cell lines; rodent (e.g., mouse) cell lines; CHO cells; microbial fungi, such as fission or budding yeasts, e.g., Saccharomyces, such as S. cerevisiae; and insect cells.

[0487] In some embodiments, a method of producing an mRNA disclosed herein is provided. In some embodiments, such a method comprises contacting a DNA molecule described herein with an RNA polymerase under conditions permissive for transcription. In some embodiments, the contacting is performed in vitro, e.g., in a cell-free system. In some embodiments, the RNA polymerase is an RNA polymerase of bacteriophage origin, such as T7 RNA polymerase. In some embodiments, NTPs are provided that include at least one modified nucleotide as discussed above. In some embodiments, the NTPs include at least one modified nucleotide as discussed above and do not comprise UTP.

[0488] In some embodiments, a method of producing a polynucleotide disclosed herein is provided. In some embodiments, such a method comprises contacting an expression construct disclosed herein with an RNA polymerase and NTPs that comprise at least one one modified nucleotide. In some embodiments, the modified nucleotide comprises a modified uridine. In further embodiments, at least 80% of the uridine positions are modified uridines. In further embodiments, at least 90% of the uridine positions are modified uridines. In further embodiments, 100% of the uridine positions are modified uridines. In further embodiments, the modified uridine comprises or is a substituted uridine, pseudouridine, or a substituted pseudouridine. In further embodiments, the modified uridine comprises or is N1-methyl-psuedouridine. In some embodiments, the expression construct comprises an encoded poly-A tail sequence.

[0489] In some embodiments, a polynucleotide disclosed herein may be comprised within or delivered by a vector system of one or more vectors. In some embodiments, one or more of the vectors, or all of the vectors, may be DNA vectors. In some embodiments, one or more of the vectors, or all of the vectors, may be RNA vectors. In some embodiments, one or more of the vectors, or all of the vectors, may be circular. In other embodiments, one or more of the vectors, or all of the vectors, may be linear. In some embodiments, one or more of the vectors, or all of the vectors, may be enclosed in a lipid nanoparticle, liposome, non-lipid nanoparticle, or viral capsid. Non-limiting exemplary vectors include plasmids, phagemids, cosmids, artificial chromosomes, minichromosomes, transposons, viral vectors, and expression vectors.

[0490] Non-limiting exemplary viral vectors include adeno-associated virus (AAV) vector, lentivirus vectors, adenovirus vectors, helper dependent adenoviral vectors (HDAd), herpes simplex virus (HSV-1) vectors, bacteriophage T4, baculovirus vectors, and retrovirus vectors. In some embodiments, the viral vector may be an AAV vector. In other embodiments, the viral vector may a lentivirus vector. In some embodiments, the lentivirus may be non-integrating. In some embodiments, the viral vector may be an adenovirus vector. In some embodiments, the adenovirus may be a high-cloning capacity or “gutless” adenovirus, where all coding viral regions apart from the 5′ and 3′ inverted terminal repeats (ITRs) and the packaging signal (‘I’) are deleted from the virus to increase its packaging capacity. In yet other embodiments, the viral vector may be an HSV-1 vector. In some embodiments, the HSV-1-based vector is helper dependent, and in other embodiments it is helper independent. For example, an amplicon vector that retains only the packaging sequence requires a helper virus with structural components for packaging, while a 30 kb-deleted HSV-1 vector that removes non-essential viral functions does not require helper virus. In additional embodiments, the viral vector may be bacteriophage T4. In some embodiments, the bacteriophage T4 may be able to package any linear or circular DNA or RNA molecules when the head of the virus is emptied. In further embodiments, the viral vector may be a baculovirus vector. In yet further embodiments, the viral vector may be a retrovirus vector. In embodiments using AAV or lentiviral vectors, which have smaller cloning capacity, it may be necessary to use more than one vector to deliver all the components of a vector system as disclosed herein. For example, one AAV vector may contain sequences encoding a Cas protein, while a second AAV vector may contain one or more guide sequences.

[0491] In some embodiments, the vector may be capable of driving expression of one or more coding sequences, such as the coding sequence of an mRNA disclosed herein, in a cell. In some embodiments, the cell may be a prokaryotic cell, such as, e.g., a bacterial cell. In some embodiments, the cell may be a eukaryotic cell, such as, e.g., a yeast, plant, insect, or mammalian cell. In some embodiments, the eukaryotic cell may be a mammalian cell. In some embodiments, the eukaryotic cell may be a rodent cell. In some embodiments, the eukaryotic cell may be a human cell. Suitable promoters to drive expression in different types of cells are known in the art. In some embodiments, the promoter may be wild type. In other embodiments, the promoter may be modified for more efficient or efficacious expression. In yet other embodiments, the promoter may be truncated yet retain its function. For example, the promoter may have a normal size or a reduced size that is suitable for proper packaging of the vector into a virus.

[0492] In some embodiments, the vector system may comprise one copy of a nucleotide sequence comprising an ORF encoding a polypeptide disclosed herein. In other embodiments, the vector system may comprise more than one copy of a nucleotide sequence encoding a polypeptide disclosed herein. In some embodiments, the nucleotide sequence encoding the polypeptide disclosed herein may be operably linked to at least one transcriptional or translational control sequence. In some embodiments, the nucleotide sequence encoding the nuclease may be operably linked to at least one promoter.

[0493] In some embodiments, the promoter may be constitutive, inducible, or tissue specific. In some embodiments, the promoter may be a constitutive promoter. Non-limiting exemplary constitutive promoters include cytomegalovirus immediate early promoter (CMV), simian virus (SV40) promoter, adenovirus major late (MLP) promoter, Rous sarcoma virus (RSV) promoter, mouse mammary tumor virus (MMTV) promoter, phosphoglycerate kinase (PGK) promoter, elongation factor-alpha (EF1a) promoter, ubiquitin promoters, actin promoters, tubulin promoters, immunoglobulin promoters, a functional fragment thereof, or a combination of any of the foregoing. In some embodiments, the promoter may be a CMV promoter. In some embodiments, the promoter may be a truncated CMV promoter. In other embodiments, the promoter may be an EF1a promoter. In some embodiments, the promoter may be an inducible promoter. Non-limiting exemplary inducible promoters include those inducible by heat shock, light, chemicals, peptides, metals, steroids, antibiotics, or alcohol. In some embodiments, the inducible promoter may be one that has a low basal (non-induced) expression level, such as, e.g., the Tet-On® promoter (Clontech).

[0494] In some embodiments, the promoter may be a tissue-specific promoter, e.g., a promoter specific for expression in the liver.

[0495] The vector may further comprise a nucleotide sequence encoding at least one guide RNA. In some embodiments, the vector comprises one copy of the guide RNA. In other embodiments, the vector comprises more than one copy of the guide RNA. In embodiments with more than one guide RNA, the guide RNAs may be non-identical such that they target different target sequences, or may be identical in that they target the same target sequence. In some embodiments where the vectors comprise more than one guide RNA, each guide RNA may have other different properties, such as activity or stability within a ribonucleoprotein complex with the RNA-guided DNA-binding agent (e.g., NmeCas9). In some embodiments, the nucleotide sequence encoding the guide RNA may be operably linked to at least one transcriptional or translational control sequence, such as a promoter, a 3′ UTR, or a 5′ UTR. In one embodiment, the promoter may be a tRNA promoter, e.g., tRNA^{Lys3}, or a tRNA chimera. See Mefferd et al., RNA. 2015 21:1683-9; Scherer et al., Nucleic Acids Res. 2007 35: 2620-2628. In some embodiments, the promoter may be recognized by RNA polymerase III (Pol III). Non-limiting examples of Pol III promoters include U6 and H1 promoters. In some embodiments, the nucleotide sequence encoding the guide RNA may be operably linked to a mouse or human U6 promoter. In other embodiments, the nucleotide sequence encoding the guide RNA may be operably linked to a mouse or human H1 promoter. In embodiments with more than one guide RNA, the promoters used to drive expression may be the same or different. In some embodiments, the nucleotide encoding the crRNA of the guide RNA and the nucleotide encoding the trRNA of the guide RNA may be provided on the same vector. In some embodiments, the nucleotide encoding the crRNA and the nucleotide encoding the trRNA may be driven by the same promoter. In some embodiments, the crRNA and trRNA may be transcribed into a single transcript. For example, the crRNA and trRNA may be processed from the single transcript to form a double-molecule guide RNA. Alternatively, the crRNA and trRNA may be transcribed into a single-molecule guide RNA. In other embodiments, the crRNA and the trRNA may be driven by their corresponding promoters on the same vector. In yet other embodiments, the crRNA and the trRNA may be encoded by different vectors.

[0496] In some embodiments, the compositions comprise a vector system, wherein the system comprises more than one vector. In some embodiments, the vector system may comprise one single vector. In other embodiments, the vector system may comprise two vectors. In additional embodiments, the vector system may comprise three vectors. When different polynucleotides are used for multiplexing, or when multiple copies of the polynucleotides are used, the vector system may comprise more than three vectors.

[0497] In some embodiments, a host cell is provided, the host cell comprising a vector, expression construct, or plasmid disclosed herein.

[0498] In some embodiments, the vector system may comprise inducible promoters to start expression only after it is delivered to a target cell. Non-limiting exemplary inducible promoters include those inducible by heat shock, light, chemicals, peptides, metals, steroids, antibiotics, or alcohol. In some embodiments, the inducible promoter may be one that has a low basal (non-induced) expression level, such as, e.g., the Tet-On® promoter (Clontech).

[0499] In additional embodiments, the vector system may comprise tissue-specific promoters to start expression only after it is delivered into a specific tissue.

### VI. Determination of Efficacy of ORFs

[0500] The efficacy of a polynucleotide comprising an ORF encoding a polypeptide disclosed herein may be determined when the polypeptide is expressed together with other components for a target function or system, e.g., using any of those recognized in the art to detect the presence, expression level, or activity of a particular polypeptide, e.g., by enzyme linked immunosorbent assay (ELISA), other immunological methods, western blots), liquid chromatography-mass spectrometry (LC-MS), FACS analysis, HiBiT peptide assay (Promega), or other assays described herein; or methods for determining enzymatic activity levels in biological samples (e.g., cells, cell lysates or extracts, conditioned medium, whole blood, serum, plasma, urine, or tissue), such as in vitro activity assays. Exemplary assays for activity of various encoded polypeptides described herein, e.g., RNA-guided DNA binding agents, include assays for indel formation, deamination, or mRNA or protein expression. In some embodiments, the efficacy of a polynucleotide comprising an ORF encoding a polypeptide disclosed herein is determined based on in vitro models.

### 1. Determination of Efficacy of ORFs Encoding an RNA-Guided DNA-Binding Agent

[0501] In some embodiments, the efficacy of an mRNA is determined when expressed together with other components of an RNP, e.g., at least one gRNA, such as a gRNA targeting TTR.

[0502] An RNA-guided DNA-binding agent (e.g., NmeCas9) with cleavase activity can lead to double-stranded breaks in the DNA. Nonhomologous end joining (NHEJ) is a process whereby double-stranded breaks (DSBs) in the DNA are repaired via re-ligation of the break ends, which can produce errors in the form of insertion/deletion (indel) mutations. The DNA ends of a DSB are frequently subjected to enzymatic processing, resulting in the addition or removal of nucleotides at one or both strands before the rejoining of the ends. These additions or removals prior to rejoining result in the presence of insertion or deletion (indel) mutations in the DNA sequence at the site of the NHEJ repair. Many mutations due to indels alter the reading frame or introduce premature stop codons and, therefore, produce a non-functional protein.

[0503] In some embodiments, the efficacy of an mRNA encoding a nuclease is determined based on in vitro models. In some embodiments, the in vitro model is HEK293 cells. In some embodiments, the in vitro model is HUH7 human hepatocarcinoma cells. In some embodiments, the in vitro model is primary hepatocytes, such as primary human or mouse hepatocytes.

[0504] In some embodiments, detecting gene editing events, such as the formation of insertion/deletion (“indel”) mutations utilize linear amplification with a tagged primer and isolating the tagged amplification products (herein after referred to as “LAM-PCR,” or “Linear Amplification (LA)” method, as described in WO2018/067447 or Schmidt et al., Nature Methods 4:1051-1057 (2007), or next-generation sequencing (“NGS”; e.g., using the Illumina NGS platform) as described below or other methods known in the art for detecting indel mutations.

[0505] For example, to quantitatively determine the efficiency of editing at the target location in the genome, in the NGS method, genomic DNA is isolated and deep sequencing is utilized to identify the presence of insertions and deletions introduced by gene editing. PCR primers are designed around the target site (e.g., TTR), and the genomic area of interest is amplified. Additional PCR is performed according to the manufacturer's protocols (Illumina) to add the necessary chemistry for sequencing. The amplicons are sequenced on an Illumina MiSeq instrument. The reads are aligned to the reference genome (e.g., mm10) after eliminating those having low quality scores. The resulting files containing the reads are mapped to the reference genome (BAM files), where reads that overlapped the target region of interest are selected and the number of wild type reads versus the number of reads which contain an insertion, substitution, or deletion is calculated. The editing percentage (e.g., the “editing efficiency” or “percent editing”) is defined as the total number of sequence reads with insertions or deletions over the total number of sequence reads, including wild type.

### EXAMPLES

[0506] The following examples are provided to illustrate certain disclosed embodiments and are not to be construed as limiting the scope of this disclosure in any way.

### Example 1. Materials and Methods

In Vitro Transcription (“IVT”) of Nuclease mRNA

[0507] Capped and polyadenylated mRNA containing N1-methyl pseudo-U was generated by in vitro transcription using routine methods. For example, a plasmid DNA containing a T7 promoter, a sequence for transcription, and a polyadenylation region was linearized with XbaI per manufacturer's protocol. The XbaI was inactivated by heating. The linearized plasmid was purified from enzyme and buffer salts. The IVT reaction to generate modified mRNA was performed by incubating at 37° C.: 50 ng/μL linearized plasmid; 2-5 mM each of GTP, ATP, CTP, and N1-methyl pseudo-UTP (Trilink); 10-25 mM ARCA (Trilink); 5 U/μL T7 RNA polymerase; 1 U/μL Murine RNase inhibitor (NEB); 0.004 U/μL Inorganic E. coli pyrophosphatase (NEB); and 1×reaction buffer. TURBO DNase (Thermo Fisher) was added to a final concentration of 0.01 U/μL, and the reaction was incubated at 37° C. to remove the DNA template.

[0508] The mRNA was purified using a MegaClear Transcription Clean-up kit (Thermo Fisher) or a RNeasy Maxi kit (Qiagen) per the manufacturers' protocols. Alternatively, the mRNA was purified through a precipitation protocol, which in some cases was followed by HPLC-based purification. Briefly, after the DNase digestion, mRNA was purified using LiCl precipitation, ammonium acetate precipitation, and sodium acetate precipitation. For HPLC purified mRNA, after the LiCl precipitation and reconstitution, the mRNA was purified by RP-IP HPLC (see, e.g., Kariko, et al. Nucleic Acids Research, 2011, Vol. 39, No. 21 el42). The fractions chosen for pooling were combined and desalted by sodium acetate/ethanol precipitation as described above. In a further alternative method, mRNA was purified with a LiCl precipitation method followed by further purification by tangential flow filtration. RNA concentrations were determined by measuring the light absorbance at 260 nm (Nanodrop), and transcripts were analyzed by capillary electrophoresis by Bioanalyzer (Agilent).

[0509] When the sequences cited in this paragraph are referred to below with respect to RNAs, it is understood that Ts should be replaced with Us (which can be modified nucleosides as described above). Messenger RNAs used in the Examples include a 5′ cap and a 3′ polyadenylation sequence e.g., up to 100 nts. Guide RNA was chemically synthesized by commercial vendors or using standard in vitro synthesis techniques with modified nucleotides.

[0510] Streptococcus pyogenes (“Spy”) Cas9 mRNA was generated from plasmid DNA encoding an open reading frame according to SEQ ID Nos: 43-47 and 49 (see sequences in Table 39A).

### Hepatocyte Cell Preparation

[0511] Primary mouse hepatocytes (PMH), primary rat hepatocytes (PRH), primary human hepatocytes (PHH), and primary cynomolgus hepatocytes (PCH) were prepared as follows. PMH (Gibco, MCM837, unless otherwise specified), PRH (Gibco, Rs977, unless otherwise specified), PCH (In Vitro ADMET Laboratories, 10136011, unless otherwise specified), PHH (Gibco, Hu8284, unless otherwise specified) were thawed and resuspended in 50 mL Cryopreserved Hepatocyte Recovery Media (CHRM) (Invitrogen, CM7000) followed by centrifugation. Cells were resuspended in hepatocyte medium with plating supplements: Williams' E Medium Plating Supplements with FBS content (Gibco, Cat. A13450). Cells were pelleted by centrifugation, resuspended in media and plated at a density of 20,000 cells/well for PMH, and 30,000 for PHH on Bio-coat collagen I coated 96-well plates (Corning #354407). Plated cells were allowed to settle and adhere for 4-6 hours in a tissue culture incubator at 37° C. and 5% CO₂ atmosphere. After incubation cells were checked for monolayer formation and were washed once and plated with 100 μL hepatocyte maintenance medium: Williams' E Medium (Gibco, Cat. A12176-01) plus supplement pack (Gibco, Cat. CM3000).

### HEK Cell Preparation

[0512] HEK-293 cells (ATCC, CRL-1573, unless otherwise specified) were thawed and resuspended in serum-free Dulbecco's Modified Eagle Medium (Corning #10-013-CV) with 10% FBS content (Gibco #A31605-02) and 1% Penicillin-Streptomycin (Gibco #15070063). Cells were counted and plated in Dulbecco's Modified Eagle Medium (Corning #10-013-CV) with 10% FBS content (Gibco #A31605-02) on 96-well tissue culture plate (Falcon, #353072). Plated cells were allowed to settle and adhere for 18 hours in a tissue culture incubator at 37° C. and 5% CO₂ atmosphere.

Preparation of LNP Formulation Containing sgRNA and Cas9 mRNA

[0513] In general, the lipid nanoparticle components were dissolved in 100% ethanol at various molar ratios. The RNA cargos (e.g., Cas9 mRNA and sgRNA) were dissolved in 25 mM citrate, 100 mM NaCl, pH 5.0, resulting in a concentration of RNA cargo of approximately 0.45 mg/mL. The LNPs used contained ionizable lipid ((9Z,12Z)-3-((4,4-bis(octyloxy)butanoyl)oxy)-2-((((3-(diethylamino)propoxy)carbonyl)oxy)methyl)propyl octadeca-9,12-dienoate, also called 3-((4,4-bis(octyloxy)butanoyl)oxy)-2-((((3-(diethylamino)propoxy)carbonyl)oxy)methyl)propyl (9Z,12Z)-octadeca-9,12-dienoate), also called herein Lipid A, cholesterol, distearoylphosphatidylcholine (DSPC), and 1,2-dimyristoyl-rac-glycero-3-methylpolyoxyethylene glycol 2000 (PEG2k-DMG) in a molar ratio of 50% Lipid A, 38% cholesterol, 9% DSPC, and 3% PEG2k-DMG. The LNPs were formulated with a lipid amine to RNA phosphate (N:P) molar ratio of about 6. The LNPs used comprise a single RNA species such as Cas9 mRNA or a sgRNA. LNP are similarly prepared with a mixture of Cas9 mRNA and a guide RNA.

[0514] The LNPs were prepared using a cross-flow technique utilizing impinging jet mixing of the lipid in ethanol with two volumes of RNA solution and one volume of water. First, the lipid in ethanol was mixed through a mixing cross with the two volumes of RNA solution. Then, a fourth stream of water was mixed with the outlet stream of the cross through an inline tee (See WO2016010840 FIG. 2.). The LNPs were held for 1 hour at room temperature, and further diluted with water (approximately 1:1 v/v). Diluted LNPs were buffer exchanged into 50 mM Tris, 45 mM NaCl, 5% (w/v) sucrose, pH 7.5 (TSS) and concentrated as needed by methods known in the art. The resulting mixture was then filtered using a 0.2 μm sterile filter. The final LNPs were characterized to determine the encapsulation efficiency, polydispersity index, and average particle size. The final LNP was stored at 4° C. or −80° C. until further use.

sgRNA and Cas9 mRNA Lipofection

[0515] Lipofection of Cas9 mRNA and gRNAs used pre-mixed lipid formulations. The lipofection reagent contained ionizable Lipid A, cholesterol, DSPC, and PEG2k-DMG in a molar ratio of 50% Lipid A, 38% cholesterol, 9% DSPC, and 3% PEG2k-DMG. This mixture was reconstituted in 100% ethanol then mixed with RNA (e.g., Cas9 mRNA and gRNA) at a lipid amine to RNA phosphate (N:P) molar ratio of about 6.0.

### Next-Generation Sequencing (“NGS”) and Analysis for Editing Efficiency

[0516] Genomic DNA was extracted using a commercial kit according to the manufacturer's protocol, for example QuickExtract™ DNA Extraction Solution (Lucigen, Cat. QE09050). To quantitatively determine the efficiency of editing at the target location in the genome, deep sequencing was utilized to identify the presence of insertions and deletions introduced by gene editing. PCR primers were designed around the target site within the gene of interest (e.g., TRAC) and the genomic area of interest was amplified. Primer sequence design was done as is standard in the field.

[0517] Additional PCR was performed according to the manufacturer's protocols (Illumina) to add chemistry for sequencing. The amplicons were sequenced on an Illumina MiSeq instrument. The reads were aligned to the human reference genome (e.g., hg38) after eliminating those having low quality scores. Reads that overlapped the target region of interest were re-aligned to the local genome sequence to improve the alignment. Then the number of wild type reads versus the number of reads which contain C-to-T mutations, C-to-A/G mutations, or indels was calculated. Insertions and deletions were scored in a 20 bp region centered on the predicted Cas9 cleavage site. Indel percentage is defined as the total number of sequencing reads with one or more base inserted or deleted within the 20 bp scoring region divided by the total number of sequencing reads, including wild type. C-to-T mutations or C-to-A/G mutations were scored in a 40 bp region including 10 bp upstream and 10 bp downstream of the 20 bp sgRNA target sequence. The C-to-T editing percentage is defined as the total number of sequencing reads with either one or more C-to-T mutations within the 40 bp region divided by the total number of sequencing reads, including wild type. The percentage of C-to-A/G mutations are calculated similarly.

### Example 2. In Vitro Editing with Selected Guides in Primary Mouse Hepatocytes (PMH)

[0518] A modified sgRNA screen was conducted to evaluate the editing efficiency of 95 different sgRNAs targeting various sites within the mouse TTR gene. Based on that study, two sgRNAs (G021320 and G021256) were selected for evaluation in a dose response assay. These two test guides were compared to a mouse TTR SpyCas9 guide(G000502) with a 20 nucleotide guide sequence. The tested NmeCas9 sgRNAs targeting the mouse TTR gene include a 24 nucleotide guide sequence (as represented by N) and a guide scaffold as follows: mN*mNNNNNNNNmNNNmNNNNNNNNNNNNmGUUGmUmAmGmCUCCCmUmGm AmAmAmCmCGUUmGmCUAmCAAU*AAGmGmCCmGmUmCmGmAmAmAmGmAm UGUGCmCGCmAmAmCmGCUCUmGmCCmUmUmCmUGmGCmAmUC*mG*mU*mU (SEQ ID NO: 508), where A, C, G, U, and N are adenine, cytosine, guanine, uracil, and any ribonucleotide, respectively, unless otherwise indicated. An m is indicative of a 2′O-methyl modification, and an * is indicative of a phosphorothioate linkage between the nucleotides. Unmodified and modified versions of the guides are provided in Table 39B.

[0519] Guides and Cas9 mRNA were lipofected, as described below, into primary mouse hepatocytes (PMH). PMH (In Vitro ADMET Laboratories MCM114) were prepared as described in Example 1. Lipofections were performed as described in Example 1 with a dose response of sgRNA and mRNA. Briefly, cells were incubated at 37° C., 5% CO₂ for 24 hours prior to treatment with lipoplexes. Lipoplexes were incubated in maintenance media containing 10% fetal bovine serum (FBS) at 37° C. for 10 minutes. Post-incubation the lipoplexes were added to the mouse hepatocytes in an 8 point, 3-fold dose response assay starting at maximum dose of 300 ng Cas9 mRNA and 50 nM sgRNA. Messenger RNA doses scale along with gRNA dose in each condition, although only gRNA dose is listed in Table 5. The cells were lysed 72 hours post-treatment and NGS analysis was performed as described in Example 1.

[0520] Dose response of editing efficiency to guide concentration was performed in triplicate samples. Table 5 shows mean percent editing and standard deviation (SD) at each guide concentration and a calculated EC₅₀ value. Mean and standard deviation (SD) is illustrated in FIG. 1.

TABLE 5
Mean percent editing in primary mouse hepatocytes

| | EC₅₀ | SgRNA | | |
|---|---|---|---|---|
| Sample | (nM) | (nM) | Mean % Edit | SD |
| SpyCas9 mRNA + | 22.0 | 50 | 95.7 | 0.3 |
| G000502 | | 16.7 | 40.9 | 14.8 |
| | | 5.6 | 6.4 | 3.3 |
| | | 1.9 | 0.8 | 0.3 |
| | | 0.6 | 0.2 | 0.08 |
| | | 0.2 | 0.1 | 0 |
| | | 0.1 | 0.1 | 0 |
| | | 0 | 0.1 | 0 |
| Nme2 Cas9 | 18.7 | 50 | 86.5 | 0.9 |
| mRNA Q | | 16.7 | 41.8 | 2.1 |
| SEQ ID NO: 27 + | | 5.6 | 5.8 | 1.4 |
| G021320 | | 1.9 | 1.2 | 0.3 |
| | | 0.6 | 0.4 | 0.2 |
| | | 0.2 | 0.1 | 0.1 |
| | | 0.1 | 0.1 | 0 |
| | | 0 | 0.1 | 0 |
| Nme2 Cas9 | 20.9 | 50 | 92.3 | 0.5 |
| mRNA Q | | 16.7 | 35.1 | 2 |
| SEQ ID NO: 27 + | | 5.6 | 2.6 | 0.5 |
| G021256 | | 1.9 | 0.6 | 0.4 |
| | | 0.6 | 0.1 | 0 |
| | | 0.2 | 0.1 | 0 |
| | | 0.1 | 0.1 | 0 |
| | | 0 | 0.1 | 0 |

### Example 3. sgRNA:mRNA Ratio Relative to sgRNA or pgRNA Using LNPs

[0521] Studies were conducted to evaluate the editing efficiency of sgRNA designs that contain PEG linkers (pgRNA). The study compared two gRNAs targeting TTR with the same guide sequence, one of which included three PEG linkers in the constant region of the guide (pgRNA, G021846) and one of which did not (G021845) as shown in Table 39B. The guides and mRNA were formulated in separate LNPs and mixed to the desired ratios for delivery to primary mouse hepatocytes (PMH) via lipid nanoparticles (LNPs).

[0522] PMH cells were prepared, treated, and analyzed as described in Example 1 unless otherwise noted. PMH cells from In Vitro ADMET Laboratories (Lot #MCM114) were plated at a density of 15,000 cells/well. Cells were treated with LNPs as described below. LNPs were generally prepared as described in Example 1. LNPs were prepared with the lipid composition of 50/9/38/3, expressed as the molar ratio of ionizable lipid A/cholesterol/DSPC/PEG, respectively. The LNPs were formulated with a lipid amine to RNA phosphate (N:P) molar ratio of about 6. LNPs encapsulated a single RNA species, either gRNA G021845, gRNA G021846 or mRNA (mRNA M) as described in Example 1.

[0523] PMH cells were treated with varying amounts of LNPs at ratios of gRNA to mRNA of 1:4, 1:2, 1:1, 2:1, 4:1, or 8:1 by weight of RNA cargo. Duplicate samples were included in each assay. Guides were assayed in an 8 point 3-fold dose response curve starting at 1 ng/μL total RNA concentration as shown in Table 6. Mean percent editing results are shown in Table 6. FIG. 2A shows mean percent editing for sgRNA G021845 and FIG. 2B shows mean percent editing for sgRNA G021846. “ND” in the table represents values that could not be detected due to experimental failure.

TABLE 6
Mean percent editing in PMH

| | | sgRNA | | pgRNA | |
|---|---|---|---|---|---|
| | | (G021845) | | (G021846) | |
| Cargo ratio | LNP dose | Mean % | | Mean % | |
| (gRNA:mRNA) | (ng/μL) | editing | SD | editing | SD |
| 1:4 | 1 | 88.1 | 1.7 | ND | ND |
| | 0.3 | 68.7 | 5.7 | 78 | 0.3 |
| | 0.1 | 28.1 | 4.1 | 39.8 | 8.2 |
| | 0.03 | 8.7 | 2 | 5.1 | 0 |
| | 0.01 | 1.5 | 0.4 | 4 | 1.2 |
| | 0.004 | 0.6 | 0.5 | 0.2 | 0 |
| | 0.001 | 0.3 | 0.2 | 0.6 | 0.3 |
| 1:2 | 1 | 90.6 | 0 | 91.2 | 2.9 |
| | 0.3 | 78 | 2.4 | 85.6 | 1.4 |
| | 0.1 | 41.5 | 5.8 | 56.6 | 4.4 |
| | 0.03 | 23 | 5.4 | 17.5 | 0 |
| | 0.01 | 6.1 | 4.3 | 18.6 | 0.5 |
| | 0.004 | 0.1 | 0.1 | 3.4 | 1.7 |
| | 0.001 | 0.1 | 0 | 2.4 | 0.7 |
| 1:1 | 1 | 90.9 | 1.4 | 94.7 | 0.6 |
| | 0.3 | 71.8 | 4.2 | 84.7 | 0.9 |
| | 0.1 | 45.7 | 3.2 | 64.3 | 5.3 |
| | 0.03 | 27.4 | 1 | 44.8 | 11.5 |
| | 0.01 | 4.7 | 2.5 | 10.2 | 4.3 |
| | 0.004 | 0.2 | 0 | 1.7 | 0.7 |
| | 0.001 | 0.1 | 0 | 0.7 | 0.5 |
| 2:1 | 1 | 92.4 | 1.6 | 94.5 | 0.8 |
| | 0.3 | 80 | 1.3 | 85.7 | 0.2 |
| | 0.1 | 45.4 | 0 | 68 | 7.9 |
| | 0.03 | 47.2 | 3 | 49.3 | 0 |
| | 0.01 | 18.1 | 1.8 | 28.8 | 4.1 |
| | 0.004 | 0.8 | 0.7 | 3.8 | 2.4 |
| | 0.001 | 0.2 | 0.1 | 0.8 | 0.3 |
| 4:1 | 1 | 87.9 | 1.9 | 90.1 | 0 |
| | 0.3 | 80.2 | 2.2 | 84 | 0.1 |
| | 0.1 | 43.4 | 0 | 60.4 | 0.1 |
| | 0.03 | 46.2 | 0.5 | 46.1 | 0 |
| | 0.01 | 11.3 | 2.3 | 26.7 | 4.9 |
| | 0.004 | 0.4 | 0.2 | 1.5 | 0.4 |
| | 0.001 | 0.4 | 0.1 | 0.5 | 0.3 |
| 8:1 | 1 | 89.2 | 0 | 87.5 | 0 |
| | 0.3 | 76.7 | 3.9 | 78.6 | 3.1 |
| | 0.1 | 59.5 | 9.4 | 59.4 | 1.1 |
| | 0.03 | 36.4 | 7 | 45.3 | 0.5 |
| | 0.01 | 8.2 | 1.2 | 18.7 | 2.9 |
| | 0.004 | 0.6 | 0.6 | 2.6 | 0.3 |
| | 0.001 | 0.1 | 0 | 0.6 | 0.2 |

### Example 3.1. In Vitro Editing of Modified Pegylated Guides (pgRNAs) in PMH Using LNPs

[0524] Modified pgRNA having the same targeting site in the mouse TTR gene were assayed to evaluate the editing efficiency in PMH cells.

[0525] PMH cells were prepared, treated, and analyzed as described in Example 1 unless otherwise noted. PMH cells from In Vitro ADMET Laboratories (Lot #MC148) were used and plated at a density of 15,000 cells/well. LNP formulations were prepared as described in Example 1. LNPs were prepared with the lipid composition of 50/9/38/3, expressed as the molar ratio of ionizable lipid A/cholesterol/DSPC/PEG, respectively. The LNPs were formulated with a lipid amine to RNA phosphate (N:P) molar ratio of about 6 and a gRNA indicated in Table 7 or mRNA

[0526] PMH in 100 μl media were treated with LNP for 30 ng total mRNA (mRNA P). by weight and LNP for gRNA in the amounts indicated in Table 7. Samples were run in duplicate. Mean editing results for PMH are shown in Table 7. and in FIG. 3.

TABLE 7
Mean percent editing in PMH

| | LNP | | |
|---|---|---|---|
| | sgRNA | Mean % | |
| Guide ID | (ng/μL) | editing | SD |
| G021844 | 0.7 | 96.6 | 0.5 |
| | 0.23 | 95.0 | 0.5 |
| | 0.08 | 80.0 | 5.9 |
| | 0.03 | 51.9 | 1.9 |
| | 0.009 | 13.9 | 0.4 |
| | 0.003 | 4.6 | 0.9 |
| | 0.001 | 0.8 | 0.1 |
| | 0.0003 | 0.2 | 0.1 |
| | 0.0001 | 0.1 | 0.0 |
| | 0.00004 | 0.2 | 0.1 |
| | 0.00001 | 0.1 | 0.0 |
| | 0 | 0.1 | 0.0 |
| G023413 | 0.7 | 96.4 | 0.4 |
| | 0.23 | 92.5 | 0.7 |
| | 0.08 | 73.9 | 0.9 |
| | 0.03 | 36.4 | 2.6 |
| | 0.009 | 10.3 | 1.5 |
| | 0.003 | 2.4 | 0.7 |
| | 0.001 | 0.6 | 0.1 |
| | 0.0003 | 0.3 | 0.0 |
| | 0.0001 | 0.1 | 0.0 |
| | 0.00004 | 0.1 | 0.0 |
| | 0.00001 | 0.1 | 0.0 |
| | 0 | 0.1 | 0.0 |
| G023414 | 0.7 | 96.5 | 0.2 |
| | 0.23 | 92.7 | 0.4 |
| | 0.08 | 74.1 | 2.7 |
| | 0.03 | 45.7 | 1.5 |
| | 0.009 | 13.7 | 0.7 |
| | 0.003 | 4.3 | 1.3 |
| | 0.001 | 0.7 | 0.1 |
| | 0.0003 | 0.2 | 0.0 |
| | 0.0001 | 0.2 | 0.1 |
| | 0.00004 | 0.2 | 0.1 |
| | 0.00001 | 0.1 | 0.0 |
| | 0 | 0.1 | 0.0 |
| G023415 | 0.7 | 96.5 | 0.5 |
| | 0.23 | 92.6 | 0.7 |
| | 0.08 | 73.1 | 0.2 |
| | 0.03 | 34.4 | 0.8 |
| | 0.009 | 14.2 | 0.2 |
| | 0.003 | 3.9 | 0.4 |
| | 0.001 | 0.5 | 0.2 |
| | 0.0003 | 0.2 | 0.0 |
| | 0.0001 | 0.2 | 0.0 |
| | 0.00004 | 0.1 | 0.0 |
| | 0.00001 | 0.1 | 0.0 |
| | 0 | 0.1 | 0.0 |
| G023416 | 0.7 | 91.5 | 1.8 |
| | 0.23 | 84.8 | 0.1 |
| | 0.08 | 56.4 | 2.7 |
| | 0.03 | 28.2 | 3.6 |
| | 0.009 | 10.0 | 1.7 |
| | 0.003 | 3.2 | 0.0 |
| | 0.001 | 0.8 | 0.3 |
| | 0.0003 | 0.2 | 0.0 |
| | 0.0001 | 0.1 | 0.0 |
| | 0.00004 | 0.1 | 0.0 |
| | 0.00001 | 0.1 | 0.0 |
| | 0 | 0.1 | 0.0 |
| G023417 | 0.7 | 90.5 | 1.8 |
| | 0.23 | 71.6 | 0.2 |
| | 0.08 | 30.9 | 6.7 |
| | 0.03 | 12.8 | 1.3 |
| | 0.009 | 4.8 | 1.5 |
| | 0.003 | 0.4 | 0.4 |
| | 0.001 | 0.2 | 0.1 |
| | 0.0003 | 0.1 | 0.0 |
| | 0.0001 | 0.1 | 0.1 |
| | 0.00004 | 0.1 | 0.0 |
| | 0.00001 | 0.1 | 0.0 |
| | 0 | 0.1 | 0.0 |
| G023418 | 0.7 | 96.8 | 0.3 |
| | 0.23 | 90.8 | 1.7 |
| | 0.08 | 63.3 | 1.8 |
| | 0.03 | 27.7 | 2.4 |
| | 0.009 | 8.8 | 0.5 |
| | 0.003 | 1.9 | 0.6 |
| | 0.001 | 0.7 | 0.2 |
| | 0.0003 | 0.2 | 0.1 |
| | 0.0001 | 0.1 | 0.0 |
| | 0.00004 | 0.1 | 0.0 |
| | 0.00001 | 0.1 | 0.0 |
| | 0 | 0.2 | 0.1 |
| G023419 | 0.7 | 96.6 | 0.6 |
| | 0.23 | 93.4 | 1.3 |
| | 0.08 | 71.1 | 3.3 |
| | 0.03 | 29.0 | 4.6 |
| | 0.009 | 9.7 | 4.1 |
| | 0.003 | 2.3 | 0.5 |
| | 0.001 | 0.4 | 0.0 |
| | 0.0003 | 0.1 | 0.0 |
| | 0.0001 | 0.2 | 0.0 |
| | 0.00004 | 0.2 | 0.0 |
| | 0.00001 | 0.1 | 0.0 |
| | 0 | 0.1 | 0.0 |

### Example 4. Nme2-mRNA Studies

### Example 4.1—In Vitro Editing in Primary Mouse Hepatocytes

[0527] Messenger mRNAs encoding Nme2Cas9 ORFs with different NLS placements were assayed for editing efficiency in primary mouse hepatocytes (PMH).

[0528] PMH were prepared as described in Example 1. Lipofection was performed using Lipofectamine MessengerMAX Transfection Reagent (Invitrogen LMRNA001) according to the manufacturer's protocol to transform cells with 100 nM sgRNA G020361 targeting mouse PCSK9 and with mRNA at the concentrations listed in Table 8. Triplicate samples were included in the assay. After 72 hours incubation at 37° C. in Maintenance Media, cells were harvested and NGS analysis was performed as described in Example 1. Mean editing results with standard deviation (SD) are shown in Table 8 and FIG. 4.

TABLE 8
Mean editing percentage in at the PCSK9 locus in PMH

| | mRNA Concentration | Mean % | |
|---|---|---|---|
| Construct | (ng/uL) | editing | SD |
| mRNA H | 2.00 | 0.07 | 0.05 |
| | 0.66 | 0.07 | 0.05 |
| | 0.22 | 0.03 | 0.05 |
| | 0.07 | 0.03 | 0.05 |
| | 0.03 | 0.03 | 0.05 |
| | 0.008 | 0.00 | 0.00 |
| | 0.003 | 0.00 | 0.00 |
| | 0.00 | 0.05 | 0.05 |
| mRNA I | 2.00 | 22.53 | 1.59 |
| | 0.66 | 10.37 | 2.25 |
| | 0.22 | 0.80 | 0.22 |
| | 0.07 | 0.07 | 0.05 |
| | 0.03 | 0.07 | 0.05 |
| | 0.008 | 0.03 | 0.05 |
| | 0.003 | 0.03 | 0.05 |
| | 0.00 | 0.20 | 0.28 |
| mRNA J | 2.00 | 26.30 | 0.86 |
| | 0.66 | 10.07 | 1.27 |
| | 0.22 | 0.93 | 0.33 |
| | 0.07 | 0.03 | 0.05 |
| | 0.03 | 0.03 | 0.05 |
| | 0.008 | 0.03 | 0.05 |
| | 0.003 | 0.03 | 0.05 |
| | 0.00 | 0.05 | 0.05 |
| mRNA K | 2.00 | 14.20 | 1.84 |
| | 0.66 | 6.70 | 1.16 |
| | 0.22 | 0.53 | 0.17 |
| | 0.07 | 0.07 | 0.09 |
| | 0.03 | 0.03 | 0.05 |
| | 0.008 | 0.00 | 0.00 |
| | 0.003 | 0.00 | 0.00 |
| | 0.00 | 0.05 | 0.05 |
| mRNA L | 2.00 | 23.30 | 0.80 |
| | 0.66 | 10.57 | 1.54 |
| | 0.22 | 0.70 | 0.42 |
| | 0.7 | 0.07 | 0.05 |
| | 0.03 | 0.07 | 0.05 |
| | 0.008 | 0.07 | 0.05 |
| | 0.003 | 0.03 | 0.05 |
| | 0.00 | 0.05 | 0.05 |
| mRNA N | 2.00 | 22.63 | 2.25 |
| | 0.66 | 11.00 | 0.00 |
| | 0.22 | 0.97 | 0.19 |
| | 0.07 | 0.17 | 0.09 |
| | 0.03 | 0.03 | 0.05 |
| | 0.008 | 0.03 | 0.05 |
| | 0.003 | 0.00 | 0.00 |
| | 0.00 | 0.05 | 0.05 |
| mRNA C | 2.00 | 19.90 | 0.16 |
| | 0.66 | 8.40 | 2.20 |
| | 0.22 | 0.70 | 0.22 |
| | 0.07 | 0.03 | 0.05 |
| | 0.03 | 0.00 | 0.00 |
| | 0.008 | 0.03 | 0.05 |
| | 0.003 | 0.00 | 0.00 |
| | 0.00 | 0.00 | 0.00 |

### Example 4.2—Dose Response of Nme2 ORF Variants and Guides with Chemical Modification Variations

[0529] Messenger mRNAs encoding Nme2Cas9 ORFs with different NLS configurations were assayed for editing efficiency in primary human hepatocytes (PHH) and HEK-293 cells. Assays were performed using gRNAs with identical guide sequences targeting VEGFA locus TS47 and gRNAs had various lengths and chemical modification patterns. PHH cells prepared as described in Example 1. HEK293 cells were thawed and plated at a density of 30,000 cells/well in 96 well plates in DMEM (Corning, 10-013-CV) with 10% FBS and incubated for 24 hours. Lipofection was performed using Lipofectamine MessengerMAX Transfection Reagent (Invitrogen LMRNA001) according to the manufacturer's protocol. A dose response 1:3 dilution series starting at atop dose of 100 nM gRNA and 1 ng/μL mRNA, was used to transform cells with gRNA at the concentrations listed in Tables 9-10. Replicate samples were included in the assay. After 72 hours incubation at 37° C., cells were harvested and NGS analysis was performed as described in Example 1. Mean editing results with standard deviation (SD) are shown in Table 9 and FIG. 5A-5C for HEK cells and Table 10 and FIG. 5D-5F for PHH.

TABLE 9
Mean percent editing in HEK cells

| | gRNA | G020055 | | | G020073 | | |
|---|---|---|---|---|---|---|---|
| mRNA | [nM] | Mean | SD | N | Mean | SD | N |
| mRNA C | 100 | 76.05 | 5.18 | 4 | 90.50 | 4.15 | 4 |
| SEQ ID NO: | 33.33 | 61.68 | 14.86 | 4 | 75.55 | 8.65 | 4 |
| 15 | 11.11 | 32.93 | 8.59 | 4 | 63.53 | 11.92 | 4 |
| | 3.70 | 14.63 | 4.08 | 4 | 39.88 | 2.40 | 4 |
| | 1.23 | 5.95 | 1.42 | 4 | 13.00 | 5.36 | 4 |
| | 0.41 | 3.35 | 0.60 | 4 | 6.03 | 1.05 | 4 |
| | 0.14 | 2.05 | 0.50 | 4 | 3.65 | 0.47 | 4 |
| | 0.00 | 1.50 | 0.22 | 4 | 1.30 | 0.22 | 4 |
| mRNA I | 100 | 85.55 | 7.06 | 4 | 88.08 | 4.90 | 4 |
| SEQ ID | 33.33 | 65.33 | 17.06 | 4 | 77.13 | 4.78 | 4 |
| NO: 19 | 11.11 | 34.98 | 12.93 | 4 | 48.63 | 4.83 | 4 |
| | 3.70 | 21.25 | 13.09 | 4 | 22.43 | 6.49 | 4 |
| | 1.23 | 8.03 | 8.06 | 4 | 9.80 | 2.12 | 4 |
| | 0.41 | 2.83 | 1.94 | 4 | 5.55 | 0.94 | 4 |
| | 0.14 | 2.15 | 0.83 | 4 | 2.45 | 0.60 | 4 |
| mRNA J | 100 | 87.03 | 3.79 | 4 | 90.93 | 1.14 | 4 |
| SEQ ID NO: | 33.33 | 72.25 | 4.18 | 4 | 72.08 | 3.88 | 4 |
| 20 | 11.11 | 40.05 | 5.01 | 4 | 42.83 | 9.02 | 4 |
| | 3.70 | 11.65 | 5.34 | 4 | 16.63 | 6.64 | 4 |
| | 1.23 | 5.78 | 0.86 | 4 | 7.00 | 1.47 | 4 |
| | 0.41 | 2.60 | 0.42 | 4 | 4.50 | 2.76 | 4 |
| | 0.14 | 1.53 | 0.50 | 4 | 1.78 | 0.24 | 4 |
| | 0.00 | 1.33 | 0.13 | 4 | 1.53 | 0.25 | 4 |

TABLE 10
Mean percent editing in PHH cells

| | | G020055 | | | G020073 | | |
|---|---|---|---|---|---|---|---|
| mRNA | gRNA [nM] | Mean | SD | N | Mean | SD | N |
| mRNA C | 100 | 27.70 | 4.29 | 3 | 31.43 | 3.63 | 3 |
| | 33.33 | 32.98 | 5.10 | 4 | 31.58 | 2.49 | 4 |
| | 11.11 | 25.55 | 2.53 | 4 | 33.58 | 1.06 | 4 |
| | 3.70 | 13.80 | 3.68 | 4 | 19.38 | 3.86 | 4 |
| | 1.23 | 6.20 | 0.68 | 4 | 12.83 | 3.60 | 4 |
| | 0.41 | 2.70 | 0.81 | 4 | 6.35 | 1.41 | 4 |
| | 0.14 | 2.25 | 0.66 | 4 | 3.18 | 1.05 | 4 |
| | 0.00 | 1.65 | 0.24 | 4 | 1.50 | 0.18 | 4 |
| mRNA I | 100 | 25.00 | 2.73 | 4 | 29.88 | 1.67 | 4 |
| | 33.33 | 25.73 | 3.69 | 4 | 26.60 | 4.95 | 4 |
| | 11.11 | 26.08 | 3.23 | 4 | 22.98 | 3.09 | 4 |
| | 3.70 | 14.55 | 3.74 | 4 | 19.03 | 3.55 | 4 |
| | 1.23 | 7.65 | 0.70 | 4 | 7.28 | 3.41 | 4 |
| | 0.41 | 4.18 | 0.97 | 4 | 4.15 | 0.62 | 4 |
| | 0.14 | 2.18 | 0.15 | 4 | 2.83 | 0.93 | 4 |
| | 0.00 | 1.40 | 0.12 | 4 | 1.35 | 0.17 | 4 |
| mRNA J | 100 | 27.90 | 1.57 | 4 | 36.38 | 5.06 | 4 |
| | 33.33 | 26.50 | 3.59 | 4 | 32.95 | 2.27 | 4 |
| | 11.11 | 21.23 | 3.98 | 4 | 29.88 | 3.59 | 4 |
| | 3.70 | 14.85 | 2.37 | 4 | 14.88 | 2.81 | 4 |
| | 1.23 | 6.78 | 2.29 | 4 | 6.43 | 0.74 | 4 |
| | 0.41 | 2.73 | 1.35 | 4 | 3.13 | 0.49 | 4 |
| | 0.14 | 2.63 | 1.69 | 4 | 2.45 | 0.73 | 4 |
| | 0.00 | 1.40 | 0.12 | 4 | 1.50 | 0.16 | 4 |

### Example 4.3—Dose Response of Nme2 NLS Variants Using LNPs in PMH

[0530] Messenger mRNAs encoding Nme2Cas9 ORFs with different NLS placements were assayed for editing efficiency in primary mouse hepatocytes (PMH). The assay tested guides targeting the mouse TTR locus and included both sgRNA and pgRNA designs.

[0531] PMH were prepared as in Example 1. LNPs were generally prepared as described in Example 1 with a single RNA species as cargo, as indicated in Table 11. LNPs were prepared with the lipid composition of 50/9/38/3, expressed as the molar ratio of ionizable Lipid A/cholesterol/DSPC/PEG, respectively. The LNPs were formulated with a lipid amine to RNA phosphate (N:P) molar ratio of about 6.

[0532] Cells were treated with 60 ng/100 μl LNP containing gRNA by RNA weight and with LNP containing mRNA as indicated in Table 11. Cells were incubated for 72 hours at 37° C. in Williams' E Medium (Gibco, A1217601) with maintenance supplements and 10% fetal bovine serum. After 72 hours incubation at 37° C., cells were harvested and editing was assessed by NGS as described in Example 1. Mean percent editing data is shown in Table 11 and FIG. 6.

TABLE 11
Mean percent editing at the mouse TTR
locus in primary mouse hepatocytes.

| | mRNA LNP | Mean % | | |
|---|---|---|---|---|
| Sample | (ng RNA) | Editing | SD | N |
| mRNA P (2 × NLS) | 40.000 | 92.30 | 0.85 | 3 |
| G021536 | 13.330 | 82.67 | 1.61 | 3 |
| | 4.440 | 62.27 | 2.96 | 3 |
| | 1.480 | 32.80 | 4.54 | 3 |
| | 0.490 | 11.23 | 1.37 | 3 |
| | 0.160 | 3.40 | 0.71 | 3 |
| | 0.050 | 0.80 | 0.22 | 3 |
| | 0.018 | 0.30 | 0.08 | 3 |
| | 0.006 | 0.20 | 0.08 | 3 |
| | 0.002 | 0.13 | 0.05 | 3 |
| | 0.001 | 0.13 | 0.05 | 3 |
| | 0.000 | 0.10 | 0.00 | 3 |
| mRNA P (2 × NLS) | 40.000 | 96.17 | 0.12 | 3 |
| G021844 (pgRNA) | 13.330 | 91.83 | 0.34 | 3 |
| | 4.440 | 75.37 | 6.80 | 3 |
| | 1.480 | 44.53 | 13.11 | 3 |
| | 0.490 | 18.30 | 5.77 | 3 |
| | 0.160 | 5.50 | 1.43 | 3 |
| | 0.050 | 1.63 | 0.71 | 3 |
| | 0.018 | 0.33 | 0.05 | 3 |
| | 0.006 | 0.17 | 0.05 | 3 |
| | 0.002 | 0.07 | 0.05 | 3 |
| | 0.001 | 0.10 | 0.00 | 3 |
| | 0.000 | 0.07 | 0.05 | 3 |
| mRNA M (1 × NLS) | 40.000 | 84.27 | 1.23 | 3 |
| G021536 | 13.330 | 66.23 | 5.39 | 3 |
| | 4.440 | 33.80 | 5.14 | 3 |
| | 1.480 | 10.17 | 5.51 | 3 |
| | 0.490 | 4.20 | 0.92 | 3 |
| | 0.160 | 1.10 | 0.45 | 3 |
| | 0.050 | 0.33 | 0.17 | 3 |
| | 0.018 | 0.23 | 0.09 | 3 |
| | 0.006 | 0.10 | 0.00 | 3 |
| | 0.002 | 0.10 | 0.00 | 3 |
| | 0.001 | 0.10 | 0.00 | 3 |
| | 0.000 | 0.07 | 0.05 | 3 |
| mRNA M (1 × NLS) | 40.000 | 88.83 | 0.37 | 3 |
| G021844 (pgRNA) | 13.330 | 74.37 | 4.63 | 3 |
| | 4.440 | 39.00 | 3.72 | 3 |
| | 1.480 | 16.40 | 2.52 | 3 |
| | 0.490 | 4.03 | 0.77 | 3 |
| | 0.160 | 1.27 | 0.05 | 3 |
| | 0.050 | 0.23 | 0.05 | 3 |
| | 0.018 | 0.20 | 0.08 | 3 |
| | 0.006 | 0.10 | 0.00 | 3 |
| | 0.002 | 0.10 | 0.00 | 3 |
| | 0.001 | 0.10 | 0.00 | 3 |
| | 0.000 | 0.10 | 0.00 | 3 |

### Example 4.4—Dose Response of Nme2 NLS Variants Using LNPs in PMH

[0533] Messenger mRNAs encoding Nme2Cas9 ORFs with different NLS placements were assayed for editing efficiency in primary mouse hepatocytes (PMH).

[0534] PMH (Gibco, MC148) were prepared as described in Example 1. LNPs were generally prepared as described in Example 1 with a single RNA species as cargo. LNPs were prepared with the lipid composition of 50/9/38/3, expressed as the molar ratio of ionizable Lipid A/cholesterol/DSPC/PEG, respectively. The LNPs were formulated with a lipid amine to RNA phosphate (N:P) molar ratio of about 6.

[0535] Cells were treated with 30 ng by RNA weight/100 μl of LNP containing gRNA G021844 and with LNP containing mRNA as indicated in Table LS4. Cells were incubated for 24 hours in Williams' E Medium (Gibco, A1217601) with maintenance supplements and 10% fetal bovine serum. After 72 hours incubation, cells were harvested and editing was assessed by NGS as described in Example 1. Mean percent editing data is shown in Table 12 and FIG. 7.

TABLE 12
Mean editing percentage in PMH treated with LNPs.

| | mRNA LNP | | | | EC₅₀ |
|---|---|---|---|---|---|
| mRNA | (ng/uL) | Mean | SD | N | (ng/uL) |
| mRNA C | 0.30 | 86.30 | 4.46 | 3 | 0.0082 |
| SEQ ID NO: | 0.10 | 84.17 | 5.52 | | |
| 15 | 0.03 | 75.80 | 1.91 | | |
| | 0.01 | 43.90 | 14.36 | | |
| | 0.004 | 34.03 | 8.64 | | |
| | 0.001 | 15.63 | 4.35 | | |
| | 0.0004 | 6.17 | 2.41 | | |
| | 0.0001 | 3.47 | 0.62 | | |
| | 0.00005 | 2.37 | 0.34 | | |
| | 0.00002 | 3.00 | 0.64 | | |
| | 0.00001 | 2.60 | 0.57 | | |
| | 0.00 | 2.70 | 0.16 | | |
| mRNA J | 0.30 | 91.30 | 2.92 | 3 | 0.0053 |
| SEQ ID NO: | 0.10 | 89.60 | 4.23 | | |
| 20 | 0.03 | 80.93 | 8.17 | | |
| | 0.01 | 62.85 | 14.35 | | |
| | 0.004 | 39.95 | 5.15 | | |
| | 0.001 | 16.70 | 3.79 | | |
| | 0.0004 | 7.73 | 2.98 | | |
| | 0.0001 | 4.23 | 0.95 | | |
| | 0.00005 | 2.80 | 0.70 | | |
| | 0.00002 | 3.23 | 0.54 | | |
| | 0.00001 | 2.67 | 0.48 | | |
| | 0.00 | 3.60 | 0.57 | | |
| mRNA Q | 0.30 | 90.67 | 4.40 | 3 | 0.0065 |
| SEQ ID NO: | 0.10 | 86.77 | 5.43 | | |
| 27 | 0.03 | 80.27 | 6.65 | | |
| | 0.01 | 56.90 | 5.48 | | |
| | 0.004 | 35.45 | 1.35 | | |
| | 0.001 | 12.63 | 3.16 | | |
| | 0.0004 | 5.17 | 0.56 | | |
| | 0.0001 | 2.73 | 0.17 | | |
| | 0.00005 | 2.97 | 0.41 | | |
| | 0.00002 | 2.73 | 0.21 | | |
| | 0.00001 | 2.87 | 0.56 | | |
| | 0.00 | 2.43 | 0.82 | | |
| mRNA N | 0.30 | 93.93 | 2.20 | 3 | 00045 |
| SEQ ID NO: | 0.10 | 90.97 | 1.77 | | |
| 24 | 0.03 | 82.80 | 8.24 | | |
| | 0.01 | 68.67 | 10.18 | | |
| | 0.004 | 42.07 | 2.25 | | |
| | 0.001 | 24.13 | 4.21 | | |
| | 0.0004 | 10.60 | 0.94 | | |
| | 0.0001 | 4.67 | 0.66 | | |
| | 0.00005 | 3.30 | 1.84 | | |
| | 0.00002 | 3.37 | 0.69 | | |
| | 0.00001 | 2.53 | 0.90 | | |
| | 0.00 | 2.33 | 1.48 | | |
| mRNA P | 0.30 | 94.47 | 1.04 | 3 | 0.0036 |
| SEQ ID NO: | 0.10 | 95.03 | 0.96 | | |
| 26 | 0.03 | 91.27 | 2.36 | | |
| | 0.01 | 74.77 | 6.91 | | |
| | 0.004 | 50.57 | 4.89 | | |
| | 0.001 | 22.67 | 0.25 | | |
| | 0.0004 | 8.27 | 0.74 | | |
| | 0.0001 | 4.93 | 0.70 | | |
| | 0.00005 | 3.37 | 0.74 | | |
| | 0.00002 | 2.93 | 0.68 | | |
| | 0.00001 | 2.87 | 0.05 | | |
| | 0.00 | 2.87 | 0.45 | | |
| mRNA M | 0.30 | 92.00 | 0.80 | 3 | 0.0093 |
| SEQ ID NO: | 0.10 | 91.40 | 1.90 | | |
| 23 | 0.03 | 79.70 | 0.70 | | |
| | 0.01 | 53.10 | 6.80 | | |
| | 0.004 | 22.47 | 14.28 | | |
| | 0.001 | 8.20 | 4.20 | | |
| | 0.0004 | 4.57 | 1.57 | | |
| | 0.0001 | 2.73 | 0.31 | | |
| | 0.00005 | 3.07 | 0.21 | | |
| | 0.00002 | 2.93 | 0.09 | | |
| | 0.00001 | 2.77 | 0.66 | | |
| | 0.00 | 3.47 | 1.09 | | |
| mRNA O | 0.30 | 89.40 | 7.00 | 3 | 0.0042 |
| SEQ ID NO: | 0.10 | 86.83 | 12.52 | | |
| 25 | 0.03 | 78.17 | 15.41 | | |
| | 0.01 | 64.83 | 12.48 | | |
| | 0.004 | 47.33 | 9.03 | | |
| | 0.001 | 20.67 | 7.12 | | |
| | 0.0004 | 8.60 | 2.95 | | |
| | 0.0001 | 2.47 | 1.33 | | |
| | 0.00005 | 4.13 | 0.37 | | |
| | 0.00002 | 2.80 | 0.62 | | |
| | 0.00001 | 11.13 | 231. | | |
| | 0.00 | 6.13 | 2.16 | | |

### Example 5—NmeCas9 Protein Expression

### Example 5.1 Protein Expression in Primary Human Hepatocytes

[0536] To quantify expression of each mRNA construct, mRNA and protein expression levels were measured following LNP delivery of mRNAs encoding either SpyCas9 or NmeCas9 to primary human hepatocytes.

[0537] PHH cells were prepared as described in Example 1. LNPs were generally prepared as described in Example 1 with a single RNA species as cargo. The LNPs were made with a molar ratio of 50% Lipid A, 38% cholesterol, 9% DSPC, and 3% PEG2k-DMG. The LNPs were formulated with a lipid amine to RNA phosphate (N:P) molar ratio of about 6.

[0538] Cells were dosed with one LNP containing mRNA (mRNA only), or two LNPs containing either mRNA or gRNA. Each LNP was applied to cells at 16.7 ng total RNA cargo/100 μl. Upon treatment with LNPs, cells were incubated for 24 hours in Williams' E Medium (Gibco, A1217601) with maintenance supplements and 10% fetal bovine serum. After 24 hours incubation at 37° C., cells were harvested and expression was quantified via Nano-Glo HiBiT lytic detection system (Promega, N3030) following manufacturer's instructions. Raw luminescence was normalized to a standard curve using HiBiT Control Protein (Promega, N3010). Protein expression of different Cas9 variants, shown in Table 13 and FIG. 8, was normalized to the expression of SpyCas9 measured in corresponding hepatocytes delivered with only the SpyCas9 mRNA. Consistent with the data shown in Table 13, protein expression from these same constructs was higher for the NmeCas9 construct than for the SpyCas9 construct when detected by western blot with an anti-HiBiT antibody from PHH cell extracts or as measured by HiBiT detection in PMH, PCH, PHH, and PRH cells.

TABLE 13
Mean fold-expression of Cas9 variants as compared to SpyCas9
expression in corresponding hepatocytes delivered with
only the SpyCas9 mRNA, as measured by the HiBiT assay

Fold-expression

| mRNA | gRNA | Cell Type | Mean | N |
|---|---|---|---|---|
| Spy Cas9 | None | PMH | 1 | 2 |
| mRNA | | PRH | 1 | 3 |
| | | PCH | 1 | 3 |
| | | PHH | 1 | 3 |
| | G000502 | PMH | 0.8 | 2 |
| | | PRH | 2.7 | 3 |
| | | PCH | 1.8 | 3 |
| | | PHH | 0.6 | 3 |
| Nme2 Cas9 | None | PMH | 6.8 | 2 |
| mRNA M | | PRH | 19.2 | 3 |
| | | PCH | 7.3 | 3 |
| | | PHH | 4.3 | 3 |
| | G021536 | PMH | 5.1 | 2 |
| | | PRH | 11.5 | 3 |
| | | PCH | 4.1 | 3 |
| | | PHH | 3.0 | 3 |

### Example 5.2: Protein Expression in T Cells

[0539] To quantify expression of each mRNA construct, protein expression levels were measured following LNP delivery of mRNAs encoding either SpyCas9 or Nme2Cas9 to T Cells.

[0540] Healthy human donor apheresis was obtained commercially (Hemacare). T cells from two donors (W106 and W864) were isolated by negative selection using the EasySep Human T cell Isolation Kit (Stem Cell Technology, Cat. 17951) on the MultiMACS Cell24 Separator Plus instrument according to manufacturer instruction. Isolated T cells were cryopreserved in CS10 freezing media (Cryostor, Cat., 07930) for future use.

[0541] Upon thaw, T cells were cultured in complete T cell growth media composed of CTS OpTmizer Base Media (CTS OpTmizer Media (Gibco, A1048501) with 1×GlutaMAX, 10 mM HEPES buffer, 1% Penicillin/Streptomycin)) supplemented with cytokines (200 IU/ml IL2, 5 ng/ml IL7 and 5 ng/ml IL15) and 2.5% human serum (Gemini, 100-512). After overnight rest at 37° C., T cells at a density of 1e6/mL were activated with T cell TransAct Reagent (1:100 dilution, Miltenyi) and incubated in a tissue culture incubator for 48 hours.

[0542] The activated T cells were treated with LNPs delivering mRNAs encoding Nme2-mRNA or Spy mRNA with HiBiT tags. LNPs were generally prepared as in Example 1. LNPs were formulated with a lipid amine to RNA phosphate (N:P) molar ratio of about 6. The LNPs encapsulating Nme2Cas9 mRNAs used Lipid A, cholesterol, DSPC, and PEG2k-DMG in a molar ratio of 50% Lipid A, 38% cholesterol, 9% DSPC, and 3% PEG2k-DMG. The LNP encapsulating SpyCas9 mRNA used Lipid A, cholesterol, DSPC, and PEG2k-DMG in a molar ratio of 50% Lipid A, 38.5% cholesterol, 10% DSPC, and 1.5% PEG2k-DMG.

[0543] Immediately prior to LNP treatment of T cells, LNPs were preincubated at 37° C. for 5 minutes at an LNP concentration of 13.33 ug/ml total RNA with 10 ug/mL ApoE3 (Peprotech, Cat #350-02) in complete T cell media supplemented with cytokines (200 IU/ml IL2 (Peprotech, Cat. 200-02), 5 ng/ml IL7 (Peprotech, Cat. 200-07), and 5 ng/ml IL15 (Peprotech, Cat. 200-15) and 2.5% human serum (Gemini, 100-512). After incubation, LNPs were then mixed 1:1 by volume with T cells in the complete T cell media with cytokines used for ApoE incubation. T cells were harvested for protein expression analysis at 24 h, 48 h, and 72 h post LNP treatment. T cells were lysed by Nano-Glo® HiBiT Lytic Assay (Promega) and Cas9 protein levels quantified via Nano-Glo® Nano-Glo HiBiT Extracellular Detection System (Promega, Cat. N2420) following the manufacturer's instructions. Luminescence was measured using the Biotek Neo2 plate reader. Linear regression was plotted on GraphPad using the protein number and luminescence readouts from the standard controls, forcing the line to go through X=0, Y=0. Used the Y=ax+0 equation to calculate number of proteins per lysate.

[0544] Samples were normalized to the mean of SpyCas9 at 0.83 ug/ml LNP dose. Tables 14A-14B, and FIG. 9A-9F shows the relative Cas9 protein expression in activated cells when mRNA at 24, 48, and 72 hours post LNP treatment in Donor 1 or Donor 2. Cas9 was expressed in a dose dependent manner in activated T cells. Protein expression was higher from Nme2Cas9 samples in comparison to the SpyCas9 sample in activated T cells.

TABLE 14A
Protein expression normalized to the mean
SpyCas9 0.83 ug/ml sample for donor 1

| | | T cell Donor 1 | | | | | |
|---|---|---|---|---|---|---|---|
| | | mRNA P | | mRNA M | | | |
| Timepoint | LNP | SEQ ID NO: 26 | | SEQ ID NO: 23 | | Spy Cas9 | |
| (hours) | (ug/mL) | Mean | N | Mean | N | Mean | N |
| 24 h | 6.67 | 89.3 | 2 | 86.5 | 2 | 26.5 | 2 |
| | 3.33 | 67.7 | 2 | 50.3 | 2 | 11.3 | 2 |
| | 1.67 | 32.4 | 2 | 13.5 | 2 | 4.4 | 2 |
| | 0.83 | 7.3 | 2 | 2.9 | 2 | 1.0 | 2 |
| | 0.42 | 1.6 | 2 | 0.8 | 2 | 0.2 | 2 |
| | 0.21 | 0.4 | 2 | 0.3 | 2 | 0.1 | 2 |
| | 0.10 | 0.2 | 2 | 0.1 | 2 | 0.0 | 2 |
| | 0.00 | 0.0 | 2 | 0.0 | 2 | 0.0 | 2 |
| 48 h | 6.67 | 657.2 | 2 | 987.0 | 2 | 165.9 | 2 |
| | 3.33 | 487.4 | 2 | 551.0 | 2 | 58.5 | 2 |
| | 1.67 | 271.0 | 2 | 165.1 | 2 | 21.4 | 2 |
| | 0.83 | 64.5 | 2 | 32.3 | 2 | 4.3 | 2 |
| | 0.42 | 11.8 | 2 | 7.8 | 2 | 1.0 | 2 |
| | 0.21 | 3.2 | 2 | 2.6 | 2 | 0.1 | 2 |
| | 0.10 | 1.1 | 2 | 0.7 | 2 | 0.1 | 2 |
| | 0.00 | 0.0 | 2 | 0.0 | 2 | 0.0 | 2 |
| 72 h | 6.67 | 53.8 | 2 | 125.6 | 2 | 24.6 | 2 |
| | 3.33 | 40.8 | 2 | 75.6 | 2 | 11.6 | 2 |
| | 1.67 | 23.1 | 2 | 25.0 | 2 | 3.5 | 2 |
| | 0.83 | 5.6 | 2 | 4.0 | 2 | 1.0 | 2 |
| | 0.42 | 1.0 | 2 | 1.3 | 2 | 0.2 | 2 |
| | 0.21 | 0.2 | 2 | 0.4 | 2 | 0.0 | 2 |
| | 0.10 | 0.2 | 2 | 0.0 | 2 | 0.1 | 2 |
| | 0.00 | 0.0 | 2 | 0.0 | 2 | 0.0 | 2 |

TABLE 14B
Protein expression normalized to the mean
SpyCas9 0.83 ug/ml sample for donor 2

| | | T cell Donor 2 | | | | | |
|---|---|---|---|---|---|---|---|
| | LNP | mRNA P | | mRNA M | | SpyCas9 | |
| Timepoint (hours) | (ug/mL) | Mean | SD | Mean | SD | Mean | SD |
| 24 h | 6.67 | 151.5 | 2 | 134.0 | 2 | 36.2 | 2 |
| | 3.33 | 98.2 | 2 | 64.5 | 2 | 17.2 | 2 |
| | 1.67 | 37.6 | 2 | 19.4 | 2 | 4.9 | 2 |
| | 0.83 | 10.4 | 2 | 4.5 | 2 | 1.0 | 2 |
| | 0.42 | 2.4 | 2 | 1.0 | 2 | 0.2 | 2 |
| | 0.21 | 0.7 | 2 | 0.4 | 2 | 0.1 | 2 |
| | 0.10 | 0.3 | 2 | 0.2 | 2 | 0.0 | 2 |
| | 0.00 | 0.0 | 2 | 0.0 | 2 | 0.0 | 2 |
| 48 h | 6.67 | 713.6 | 2 | 1067.3 | 2 | 119.0 | 2 |
| | 3.33 | 507.5 | 2 | 587.1 | 2 | 54.9 | 2 |
| | 1.67 | 229.0 | 2 | 149.2 | 2 | 15.9 | 2 |
| | 0.83 | 59.1 | 2 | 33.8 | 2 | 3.6 | 2 |
| | 0.42 | 10.5 | 2 | 8.3 | 2 | 1.0 | 2 |
| | 0.21 | 3.1 | 2 | 2.8 | 2 | 0.3 | 2 |
| | 0.10 | 1.0 | 2 | 1.9 | 2 | 0.2 | 2 |
| | 0.00 | 0.0 | 2 | 0.2 | 2 | 0.0 | 2 |
| 72 h | 6.67 | 53.8 | 2 | 108.2 | 2 | 17.1 | 2 |
| | 3.33 | 40.7 | 2 | 60.5 | 2 | 8.3 | 2 |
| | 1.67 | 19.3 | 2 | 18.2 | 2 | 3.1 | 2 |
| | 0.83 | 4.7 | 2 | 3.8 | 2 | 1.0 | 2 |
| | 0.42 | 1.3 | 2 | 1.4 | 2 | 0.3 | 2 |
| | 0.21 | 0.4 | 2 | 0.4 | 2 | 0.1 | 2 |
| | 0.10 | 0.3 | 2 | 0.0 | 2 | 0.4 | 2 |
| | 0.00 | 0.0 | 2 | 0.1 | 2 | 0.0 | 2 |

### Example 6. In Vivo Editing in Mouse Liver Using Lipid Nanoparticles (LNPs)

[0545] The LNPs used in all in vivo studies were formulated as described in Example 1. Deviations from the protocol are noted in the respective Example. Transport and storage solution (TSS) used in LNP preparation was dosed in the experiment as a vehicle-only negative control.

### In Vivo Editing in the Mouse Model

[0546] Selected guide designs were tested for editing efficiency in vivo. CD-1 female mice, ranging 6-10 weeks of age were used in each study involving mice. Animals were weighed pre-dose. LNPs were formulated generally as described in Example 1. LNPs contained a molar ratio of 50% ionizable Lipid A, 38% cholesterol, 9% DSPC, and 3% PEG2k-DMG. The lipid nucleic acid assemblies were formulated with a lipid amine to RNA phosphate (N:P) molar ratio of about 6.

[0547] LNPs were dosed via the lateral tail vein at a volume of 0.2 mL per animal (approximately 10 mL per kilogram body weight). Body weight was measured at twenty-four hours post-administration. About 6-7 days after LNP delivery, animals were euthanized by exsanguination under isoflurane anesthesia post-dose. Blood was collected via cardiac puncture into serum separator tubes. For studies involving in vivo editing, liver tissue was collected from the left medial lobe from each animal for DNA extraction and analysis.

[0548] For the in vivo studies, genomic DNA was extracted from tissue using a bead-based extraction kit, e.g., the Zymo Quick-DNA 96 kit (Zymo Research, Cat. #D3010) according to the manufacturer's protocol. NGS analysis was performed as described in Example 1.

### Transthyretin (TTR) ELISA Analysis Used in Animal Studies

[0549] Blood was collected, and the serum was isolated as described above. The total TTR serum levels were determined using a Mouse Prealbumin (Transthyretin) ELISA Kit (Aviva Systems Biology, Cat. OKIA00111). Kit reagents and standards were prepared according to the manufacturer's protocol. Mouse serum was diluted to a final dilution of 10,000-fold with 1×assay diluent. Both standard curve dilutions (100 μL each) and diluted serum samples were added to each well of the ELISA plate pre-coated with capture antibody. The plate was incubated at room temperature for 30 minutes before washing. Enzyme-antibody conjugate (100 μL per well) was added for a 20-minute incubation. Unbound antibody conjugate was removed and the plate was washed again before the addition of the chromogenic substrate solution. The plate was incubated for 10 minutes before adding 100 μL of the stop solution, e.g., sulfuric acid (approximately 0.3 M). The plate was read on a Clariostar plate reader at an absorbance of 450 nm. Serum TTR levels were calculated by SoftMax Pro software ver. 6.4.2 or Mars software ver. 3.31 using a four-parameter logistic curve fit off the standard curve. Final serum values were adjusted for the assay dilution. Percent protein knockdown (% KD) values were determined relative to controls, which generally were animals sham-treated with vehicle (TSS) unless otherwise indicated. Percent TSS was calculated by division of each sample TTR value by the average value of the TSS group then adjusted to a percentage value.

### Example 6.1. In Vivo Editing Using Co-Formulated LNPs

[0550] The editing efficiency of the modified sgRNAs tested in Example 4.2 were further evaluated in a mouse model. Guide RNA designs with identical guide sequences targeting mouse PCSK9 but with conserved regions differing lengths were tested LNPs were prepared as described in Example 1. The LNPs were prepared using ionizable lipid A, cholesterol, DSPC, and PEG2k-DMG in a molar ratio of 50% Lipid A, 38% cholesterol, 9% DSPC, and 3% PEG2k-DMG. The LNPs were formulated with a lipid amine to RNA phosphate (N:P) molar ratio of about 6. A gRNA targeting the PCSK9 gene, as indicated in Table 15, and mRNA C were co-formulated at 1:2 gRNA to mRNA by weight in LNPs. LNPs were administered to female CD-1 mice (n=5) at a dose of 1 mg/kg of total RNA as described above. Mice were euthanized at 7 days post dosing. The editing efficiency for LNPs containing the indicated sgRNAs are shown in Table 15 and illustrated in FIG. 10.

TABLE 15
Mean percent editing in mouse liver.

| | Dose | Mean | |
|---|---|---|---|
| Guide | (mg/kg) | % Edit | SD |
| Vehicle | — | 0.0 | 0.0 |
| G017564 | 1 | 2.5 | 0.9 |
| G017565 | 1 | 2.2 | 1.0 |
| G017566 | 1 | 2.2 | 1.2 |

### Example 6.2. In Vivo Editing Using pgRNA and mRNA LNPs

[0551] The editing efficiency of modified pgRNAs were evaluated in vivo. Four nucleotides in each of the loops of the repeat/anti-repeat region, hairpin 1, and hairpin 2 were substituted with Spacer-18 PEG linkers, in addition to the guide modifications specified in the previous study in Example 6.1.

[0552] LNPs were generally prepared as described in Example 1 with a single RNA species as cargo. The LNPs contained lipid A, cholesterol, DSPC, and PEG2k-DMG in a molar ratio of 50% Lipid A, 38% cholesterol, 9% DSPC, and 3% PEG2k-DMG. The LNPs were formulated with a lipid amine to RNA phosphate (N:P) molar ratio of about 6.

[0553] LNPs containing gRNAs targeting TTR gene indicated in Table 16 were administered to female CD-1 mice (n=5) at a dose of 0.1 mg/kg or 0.3 mg/kg of total RNA as described above. LNP containing mRNA (mRNA M SEQ ID NO: 23) and LNP containing a pgRNA (G021846 or G021844) were delivered simultaneously at a ratio of 1:2 by RNA weight, respectively. Mice were euthanized at 7 days post dose.

[0554] The editing efficiency, serum TTR knockdown, and percent TSS for the LNPs containing the indicated pgRNAs are shown in Table 16 and illustrated in FIG. 11A-11C respectively.

TABLE 16
Liver Editing, Serum TTR protein, and TTR protein knockdown

| | | | | Mean | | | |
|---|---|---|---|---|---|---|---|
| | | | | serum | | | |
| | Dose | Mean | | TTR | | Mean | |
| Guide | (mg/kg) | % Edit | SD | (ug/ml) | SD | % TSS | SD |
| TSS | NA | 0.1 | 0 | 733.1 | 131.2 | 100 | 17.9 |
| G021846 | 0.1 | 21.9 | 2.8 | 369.5 | 56.2 | 50.4 | 7.7 |
| | 0.3 | 33.8 | 2.9 | 269.8 | 21.3 | 36.8 | 2.6 |
| G021844 | 0.1 | 59.6 | 3.9 | 84.1 | 26.6 | 11.5 | 3.6 |
| | 0.3 | 71.6 | 1.8 | 24.4 | 9.2 | 3.3 | 1.2 |

[0555] A pgRNA (G021844) from the study described above was evaluated in mice with alternative mRNAs at varied dose levels. LNPs were generally prepared as described in Example 1 with a single RNA species as cargo. LNPs containing pgRNA (G21844) or mRNA (mRNA P or mRNA M) were formulated as described in Example 1. The LNPs used in were prepared with ionizable lipid A, cholesterol, DSPC, and PEG2k-DMG in a molar ratio of 50% Lipid A, 38% cholesterol, 9% DSPC, and 3% PEG2k-DMG. The LNPs were formulated with a lipid amine to RNA phosphate (N:P) molar ratio of about 6. Both G000502 and G021844 target exon 3 of the mouse TTR gene. LNP containing pgRNA and LNP containing mRNA were dosed simultaneously based on combined RNA weight at a ratio of 2:1 guide:mRNA by RNA weight, respectively. An additional LNP was co-formulated with G000502 and SpyCas9 mRNA at a ratio of 1:2 by weight, respectively, a preferred SpyCas9 guide:mRNA ratio.

[0556] LNPs indicated in Table 17 were administered to female CD-1 mice (n=4) at a dose of 0.1 mg/kg or 0.03 mg/kg of total RNA. The editing efficiency for LNPs containing the indicated gRNAs are shown in Table 17 and illustrated in FIGS. 11D and 11E.

TABLE 17
Liver Editing and Serum TTR protein knockdown

| | | Dose | Mean % | | Mean serum | |
|---|---|---|---|---|---|---|
| Guide | mRNA | (mg/kg) | Edit | SD | TTR (ug/ml) | SD |
| TSS | TSS | NA | 0.12 | 0.04 | 937.4 | 100.5 |
| G000502 | SpyCas9 | 0.1 | 44.50 | 6.9 | 370.7 | 80.1 |
| G021844 | mRNA P | 0.03 | 37.70 | 2.9 | 398.7 | 41.9 |
| | SEQ ID | 0.1 | 65.40 | 2.2 | 92.8 | 27.5 |
| | NO: 26 | | | | | |
| | mRNA M | 0.03 | 32.02 | 2.1 | 527.4 | 93.6 |
| | SEQ ID | | | | | |
| | NO: 23 | 0.1 | 62.50 | 17.4 | 268.6 | 236.8 |

### Example 6.3. In Vivo Editing Using sgRNA and mRNA LNPs

[0557] LNPs were generally prepared as described in Example 1 with a single RNA species as cargo. The LNPs used in were prepared with Lipid A, cholesterol, DSPC, and PEG2k-DMG in a molar ratio of 50% Lipid A, 38% cholesterol, 9% DSPC, and 3% PEG2k-DMG. The LNPs were formulated with a lipid amine to RNA phosphate (N:P) molar ratio of about 6. The sgRNAs were designed to target the pcsk9 gene (G020361) or the Rosa26 gene (G020848).

[0558] LNPs containing sgRNA or mRNA were administered to female CD-1 mice (n=5) at a dose of 1 mg/kg of total RNA. The mRNAs tested (mRNA C, mRNA J, mRNA Q, mRNA N) were designed with varying numbers and arrangements of NLS. LNPs were dosed simultaneously based on the combined weight of RNA cargo at a 1:1 ratio of gRNA:mRNA by RNA weight. Mean percent editing is shown in Table 18 and illustrated in FIG. 12.

TABLE 18
Mean percent editing in mouse liver.

| | | Dose | Mean | |
|---|---|---|---|---|
| Guide | mRNA | (mg/kg) | % indel | SD |
| TSS | TSS | NA | 0.1 | 0.0 |
| G020361 | mRNA C | 1 | 3.7 | 1.5 |
| | mRNA J | 1 | 2.1 | 0.8 |
| | mRNA Q | 1 | 4.5 | 1.8 |
| | mRNA N | 1 | 3.6 | 1.0 |
| G020848 | mRNA C | 1 | 0.8 | 0.3 |
| | mRNA J | 1 | 0.4 | 0.1 |
| | mRNA Q | 1 | 0.7 | 0.2 |
| | mRNA N | 1 | 0.9 | 0.5 |

### Example 7. In Vivo Editing with NmeCas9 and Either sgRNA or pgRNA

[0559] The editing efficiency of the modified pgRNAs tested with Nme2Cas9 was tested in a mouse model. All Nine sgRNAs tested comprised the same 24nt guide sequence targeting mTTR.

[0560] LNPs were generally prepared as described in Example 1 with a single RNA species as cargo. The LNPs used in were prepared with Lipid A, cholesterol, DSPC, and PEG2k-DMG in a molar ratio of 50% Lipid A, 38% cholesterol, 9% DSPC, and 3% PEG2k-DMG. The LNPs were formulated with a lipid amine to RNA phosphate (N:P) molar ratio of about 6. The LNPs were mixed at a ratio of 2:1 by weight of gRNA to mRNA cargo. Dose is calculated based on the combined RNA mass of gRNA and mRNA. Transport and storage solution (TSS) used in LNP preparation was dosed in the experiment as a vehicle-only negative control.

[0561] CD-1 female mice, ranging 6-10 weeks of age were used in each study involving mice (n=5 per group, except TSS control n=4). Formulations were administered intravenously via tail vein injection according to the doses listed in Table 19. Animals were periodically observed for adverse effects for at least 24 hours post-dose. Six days after treatment, animals were euthanized by cardiac puncture under isoflurane anesthesia; liver tissue was collected for downstream analysis. Liver punches weighing between 5 and 15 mg were collected for isolation of genomic DNA and total RNA. Genomic DNA samples were analyzed with NGS sequencing as described in Example 1. The editing efficiency for LNPs containing the indicated mRNAs and gRNAs are shown in Table 19 and illustrated in FIG. 13.

TABLE 19
Mean percent editing in mouse liver

| | | Dose | Mean % | | |
|---|---|---|---|---|---|
| mRNA | gRNA | (mg/kg) | Edit | SD | N |
| TSS | TSS | — | 0.08 | 0.05 | 4 |
| mRNA P | G021536 | 0.03 | 21.68 | 6.87 | 5 |
| (2 × N term | (101-nt Nme sgRNA) | 0.1 | 63.22 | 3.28 | 5 |
| NLS, HiBiT) | | | | | |
| mRNA P | G021844 | 0.03 | 36.28 | 9.45 | 5 |
| (2 × N term | (93-nt Nme pgRNA) | 0.1 | 66.44 | 3.55 | 5 |
| NLS, HiBiT) | | | | | |
| mRNA O | G021844 | 0.03 | 40.88 | 14.16 | 5 |
| (2 × N-term | (93-nt Nme pgRNA) | 0.1 | 66.02 | 5.01 | 5 |
| NLS) | | | | | |

### Example 8. In Vivo Base Editing with Nme2Cas9 gRNA

[0562] The editing efficiency of the modified gRNAs with different mRNAs were tested with Nine base editor construct in the mouse model. This experiment was performed in parallel to Example 7 and used the same control samples. LNPs were generally prepared as described in Example 1 with a single RNA species as cargo. The LNPs used were prepared with Lipid A, cholesterol, DSPC, and PEG2k-DMG in a molar ratio of 50% Lipid A, 38% cholesterol, 9% DSPC, and 3% PEG2k-DMG. The LNPs were formulated with a lipid amine to RNA phosphate (N:P) molar ratio of about 6. The LNPs used were formulated as described in Example 1, except that each component, guide RNA, or mRNA was formulated individually into an LNP, and the LNP were mixed prior to administration as described in Table 20. For Nme2Cas9 and Nme2Cas9 base editor samples, LNPs were mixed at a ratio of 2:1 by weight of gRNA to editor mRNA cargo. For SpyCas9 base editor samples, LNPs were mixed at a ratio of 1:2 by weight of gRNA to editor mRNA cargo. Dose, as indicated in Table 20 and FIG. 14, is calculated based on the combined RNA weight of gRNA and editor mRNA. Base editor samples were treated with an additional 0.03 mpk of UGI mRNA. Transport and storage solution (TSS) used in LNP preparation was dosed in the experiment as a vehicle-only negative control.

[0563] CD-1 female mice, ranging 6-10 weeks of age were used in each study involving mice (n=5 per group, except TSS control n=4). Formulations were administered intravenously via tail vein injection according to the doses listed in Table 20. Animals were periodically observed for adverse effects for at least 24 hours post-dose. Six days after treatment, animals were euthanized by cardiac puncture under isoflurane anesthesia; liver tissue were collected for downstream analysis. Liver punches weighing between 5 and 15 mg were collected for isolation of genomic DNA and total RNA. Genomic DNA was extracted using a DNA isolation kit (ZymoResearch, D3010) and samples were analyzed with NGS sequencing as described in Example 1. The editing efficiency for LNPs containing the indicated gRNAs are shown in Table 20 and illustrated in FIG. 14.

TABLE 20
Mean percent editing in mouse liver.

| | Dose | C-to-T % | | | C-to-A/G % | | | Indel % | | |
|---|---|---|---|---|---|---|---|---|---|---|
| Sample | (mg/kg) | Mean | SD | n | Mean | SD | n | Mean | SD | n |
| TSS | 0 | 0.00 | 0.00 | 4 | 0.10 | 0.00 | 4 | 0.08 | 0.05 | 4 |
| mRNA O + G021844 | 0.03 | 0.00 | 0.00 | 5 | 0.08 | 0.04 | 5 | 40.88 | 14.16 | 5 |
| (Nme2Cas9 + pgRNA) | 0.1 | 0.00 | 0.00 | 5 | 0.02 | 0.04 | 5 | 66.02 | 5.01 | 5 |
| mRNA S + mRNA G + | 0.03 | 25.60 | 5.28 | 5 | 3.50 | 0.76 | 5 | 11.14 | 2.18 | 5 |
| G021844 | 0.1 | 46.34 | 1.53 | 5 | 5.74 | 0.33 | 5 | 13.52 | 0.90 | 5 |
| (Nme2 base editor + UGI + | | | | | | | | | | |
| pgRNA) | | | | | | | | | | |
| mRNA E + mRNA G + | 0.03 | 9.28 | 2.82 | 5 | 0.94 | 0.54 | 5 | 7.34 | 1.61 | 5 |
| G000502 | 0.1 | 30.72 | 8.51 | 5 | 2.86 | 0.23 | 5 | 15.60 | 2.58 | 5 |
| (SpyBC22n + UGI + sgRNA) | | | | | | | | | | |

### Example 9. Guide Screen with Nme1Cas9 and Nme3Cas9 mRNAs in T Cells

[0564] The editing efficiency of one modified gRNA scaffold was tested in T cells with Nme1Cas9 or Nme3Cas9 mRNA using guides with 9 distinct target sequences in the TRAC locus.

[0565] Healthy human donor apheresis was obtained commercially (Hemacare, Donor 3786), and cells were washed and resuspended in CliniMACS® PBS/EDTA buffer (Miltenyi Biotec Cat. 130-070-525) and processed in a MultiMACS™ Cell 24 Separator Plus device (Miltenyi Biotec). T cells were isolated via positive selection using a Straight from Leukopak® CD4/CD8 MicroBead kit, human (Miltenyi Biotec Cat. 130-122-352). T cells were aliquoted and cryopreserved for use in Cryostor® CS10 (StemCell Technologies Cat. 07930). Upon thawing, T cells were plated at a density of 1.0×10\hat{ }⁶ cells/mL in T cell growth media (TCGM) composed of CTS OpTmizer T Cell Expansion SFM and T Cell Expansion Supplement (Thermo Fisher Cat. A1048501), 5% human AB serum (GeminiBio, Cat. 100-512), 1× Penicillin-Streptomycin, 1× Glutamax, 10 mM HEPES, 200 U/mL recombinant human interleukin-2 (Peprotech, Cat. 200-02), 5 ng/mL recombinant human interleukin-7 (Peprotech, Cat. 200-07), and 5 ng/mL recombinant human interleukin-15 (Peprotech, Cat. 200-15). T cells were rested in this media for 24 hours, at which time they were activated with T Cell TransAct™, human reagent (Miltenyi, Cat. 130-111-160) added at a 1:100 ratio by volume.

[0566] For Nme1Cas9 guide screening, solutions containing mRNA encoding Nme1Cas9 (mRNA AB) were prepared in P3 buffer. Guide RNAs targeting various sites in the TRAC locus were denatured for 2 minutes at 95° C. and incubated at room temperature for 5 minutes. Forty-eight hours post activation, T cells were harvested, centrifuged, and resuspended at a concentration of 12.5×10\hat{ }⁶ cells/mL in P3 electroporation buffer (Lonza). For each well to be electroporated, 1×10\hat{ }⁵ cells were mixed with 600 ng of Nme1Cas9 mRNA and 5 μM of gRNAs in a final volume of 20 μL of P3 electroporation buffer. This mix was transferred in duplicate to 96-well Nucleofector™ plates and electroporated using the manufacturer's pulse code. Electroporated T cells were immediately rested in CTS OpTmizer T cell growth media without cytokines for 15 minutes before being transferred to new flat-bottom 96-well plates containing an additional CTS OpTmizer T cell growth media supplemented with cytokines. The resulting plates were incubated at 37° C. for 3 days. On day 3 post-electroporation, cells were split 1:2 in 2 U-bottom plates.

[0567] On day 7 post-electroporation, the plated T cells were assayed by flow cytometry to determine surface expression of the T cell receptor. Briefly, T cells were incubated with antibodies against CD3 (BioLegend, Cat. No. 317336), CD4 (BioLegend, Cat. No. 317434), CD8 (BioLegend, Cat. No. 301046), and Viakrome (Beckman Coulter, Cat. No. C36628). Cells were subsequently washed, resuspended in cell staining buffer and processed on a Cytoflex flow cytometer (Beckman Coulter). Flow cytometry data was analyzed using the FlowJo software package. T cells were gated based on size, shape, viability, and the expression of CD8 and CD3. Samples were run in duplicate.

[0568] The CD3 is a cell-surface component of the T cell receptor complex and its presence at the cell surface is used as a surrogate marker for TRAC protein expression. CD3 negative cell population, and corresponding standard deviation (SD) for each of the indicated gRNAs are shown in Table 21 and illustrated in FIG. 16.

TABLE 21
Mean percent CD3 negative T cells following
TRAC editing with Nme1Cas9

| Guide ID | Mean | SD |
|---|---|---|
| G024103 | 0.95 | 0.02 |
| G024104 | 1.52 | 0.04 |
| G024108 | 52.82 | 0.40 |
| G024109 | 1.69 | 0.14 |
| G024110 | 2.24 | 0.39 |
| G024111 | 2.10 | 0.06 |
| G024112 | 1.81 | 0.14 |
| G024113 | 1.19 | 0.26 |
| G024114 | 0.97 | 0.05 |

[0569] For screening of guides with Nme3Cas9 mRNA, T cells were prepared as described in this example. Solutions containing mRNA encoding Nme3Cas9 (mRNA Z) were prepared in P3 buffer, as well as controls of Nme1Cas9 (mRNA AB) and Nme2Cas9 (mRNA O). Electroporation of an NmeCas9 (e.g., Nme1Cas9, Nme2Cas9, or Nme3Cas9) gRNA and mRNA was performed as described above. Samples were electroporated in triplicate. On day 3 post electroporation, cells were assayed via flow cytometry as described above.

[0570] The CD3-negative cell population and corresponding standard deviation (SD) for each of the indicated gRNAs are shown in Table 22 and illustrated in FIG. 17.

TABLE 22
Mean percent CD3 negative T cells following
TRAC editing with Nme3Cas9.

| Guide ID | Mean | SD |
|---|---|---|
| G028844 | 2.99 | 0.49 |
| G028845 | 2.97 | 0.30 |
| G028846 | 22.83 | 1.65 |
| G028847 | 8.71 | 1.16 |
| G028848 | 95.6 | 0.74 |
| G028849 | 6.24 | 0.02 |
| G028850 | 69.63 | 3.57 |
| G028851 | 1.49 | 0.53 |
| G028852 | 79.13 | 3.34 |
| G028853 (Nme1 Control) | 97.43 | 0.20 |
| G021469 (Nme2 Control) | 92.46 | 2.00 |

### Example 10. Expression of Codon Optimized NmeCas9 mRNAs

[0571] To quantify expression of each mRNA construct, protein expression levels were measured following electroporation of mRNAs encoding Nme1 Cas9, Nme2Cas9, or Nme3Cas9 into T cells. All of the NmeCas9 mRNA constructs have the same general structure with sequential SV40 and nucleoplasmin nuclear localization signal coding sequences N-terminal to the NmeCas9 open reading frame. Constructs include a coding sequence for a HiBiT tag C-terminal to the NmeCas9 open reading frame. The components are joined by linkers and the specific sequences are provided herein.

[0572] Healthy human donor apheresis was obtained commercially (Hemacare, Donor 3786), and cells were washed and resuspended in CliniMACS® PBS/EDTA buffer (Miltenyi Biotec Cat. 130-070-525) and processed in a MultiMACS™ Cell 24 Separator Plus device (Miltenyi Biotec). T cells were isolated via positive selection using a Straight from Leukopak® CD4/CD8 MicroBead kit, human (Miltenyi Biotec Cat. 130-122-352). T cells were aliquoted and cryopreserved for future use in Cryostor® CS10 (StemCell Technologies Cat. 07930). Upon thawing, T cells were plated at a density of 1.0×10\hat{ }⁶ cells/mL in T cell growth media (TCGM) composed of CTS OpTmizer T Cell Expansion SFM and T Cell Expansion Supplement (ThermoFisher Cat. A1048501), 5% human AB serum (GeminiBio, Cat. 100-512), 1× Penicillin-Streptomycin, 1× Glutamax, 10 mM HEPES, 200 U/mL recombinant human interleukin-2 (Peprotech, Cat. 200-02), 5 ng/mL recombinant human interleukin-7 (Peprotech, Cat. 200-07), and 5 ng/mL recombinant human interleukin-15 (Peprotech, Cat. 200-15). T cells were rested in this media for 24 hours, at which time they were activated with T Cell TransAct™, human reagent (Miltenyi, Cat. 130-111-160) added at a 1:100 ratio by volume.

[0573] Solutions containing mRNA encoding NmeCas9 were prepared in P3 buffer. Guide RNAs targeting the TRAC locus were removed from the storage and denatured for 2 minutes at 95° C. and incubated at room temperature for 5 minutes. Forty-eight hours post activation, T cells were harvested, centrifuged, and resuspended at a concentration of 12.5×10\hat{ }⁶ cells/mL in P3 electroporation buffer (Lonza). Each well to be electroporated contained 1×10\hat{ }⁵ cells, NmeCas9 mRNA as specified in Table 23, and 1 μM gRNAs (G028853 for Nme1Cas9; G021469 for Nme2Cas9; G028848 for Nme3Cas9) as specified in Table 23 in a final volume of 20 μL of P3 electroporation buffer. NmeCas9 mRNA was tested using a three-fold, five point serial dilution starting at 600 ng mRNA. The appropriate gRNA & mRNA mix was transferred in triplicate to 96-well Nucleofector™ plates and electroporated using the manufacturer's pulse code. Electroporated T cells were immediately rested in CTS OpTmizer T cell growth media without cytokines for 15 minutes before being transferred to new flat-bottom 96-well plates containing an additional CTS OpTmizer T cell growth media supplemented with cytokines. The resulting plates were incubated at 37° C. for 24 hours prior to HiBiT luminescence assay or 96 hours prior to flow cytometry.

[0574] T cells were harvested for protein expression analysis at 24 h post-electroporation. T cells were lysed by Nano-Glo® HiBiT Lytic Assay (Promega). Luminescence was measured using the Biotek Neo2 plate reader. Table 23 and FIG. 18 show the Cas9 protein expression and corresponding standard deviation (SD) in activated cells as relative luminescence units (RLU).

TABLE 23
Mean luminescence (RLU) as a relative measure of
Cas9 protein expression in T cells at 24 hours.

| | mRNA | | | | | |
|---|---|---|---|---|---|---|
| | (ng) | 600 | 200 | 66.6 | 22.2 | 7.4 |
| mRNA X | Mean | 6955.7 | 2941.0 | 1893.7 | 758.3 | 288.7 |
| (Nme1Cas9) | (RLUs) | | | | | |
| G028853 | SD | 800.5 | 232.0 | 268.3 | 256.0 | 21.4 |
| mRNA Y | Mean | 10999.7 | 4967.6 | 2888.7 | 1423.0 | 479.3 |
| (Nme1Cas9) | (RLUs) | | | | | |
| G028853 | SD | 1621.8 | 444.6 | 451.5 | 213.3 | 42.0 |
| mRNA V | Mean | 43026.7 | 15244.0 | 6522.3 | 2658.3 | 1067.3 |
| (Nme2Cas9) | (RLUs) | | | | | |
| G021469 | SD | 7729.3 | 1288.1 | 229.0 | 174.3 | 127.1 |
| mRNA Z | Mean | 19217.3 | 6488.0 | 2386.0 | 1033.3 | 414.7 |
| (Nme3Cas9) | (RLUs) | | | | | |
| G028848 | SD | 1311.8 | 521.0 | 394.3 | 93.6 | 50.2 |

[0575] On day 4 post-editing, T cells were assayed by flow cytometry to determine surface protein expression. Briefly, T cells were incubated for 30 minutes at 4° C. with a mixture of antibodies diluted in cell staining buffer (BioLegend, Cat. No. 420201). Antibodies against CD3 (BioLegend, Cat. No. 317336), CD4 (BioLegend, Cat. No. 317434), CD8 (BioLegend, Cat. No. 301046), and Viakrome (Beckman Coulter, Cat. No. C36628) were diluted at 1:100. Cells were subsequently washed, resuspended in 100 μL of cell staining buffer and processed on a Cytoflex flow cytometer (Beckman Coulter). Flow cytometry data were analyzed using the FlowJo software package. T cells were gated based on size, shape, viability, CD8, and CD3. Samples were run in triplicate. The CD3-negative cell population and corresponding standard deviation (SD) for each of the indicated gRNAs are shown in Table 24 and illustrated in FIG. 19.

TABLE 24
Percent CD3-negative cells of T cells following TRAC editing.

| | mRNA (ng) | 600 | 200 | 66.7 | 22.2 | 7.4 |
|---|---|---|---|---|---|---|
| mRNA X | Mean | 95.2 | 94.6 | 90.3 | 79.9 | 58.7 |
| (Nme1Cas9) | SD | 0.8 | 1.1 | 0.6 | 3.1 | 4.8 |
| G028853 | | | | | | |
| mRNA Y | Mean | 97.2 | 96.2 | 93.7 | 88.7 | 75.0 |
| (Nme1Cas9) | SD | 0.8 | 1.1 | 0.9 | 1.4 | 1.3 |
| G028853 | | | | | | |
| mRNA V | Mean | 87.7 | 84.6 | 80.3 | 66.6 | 42.7 |
| (Nme2Cas9) | SD | 3.3 | 3.9 | 2.4 | 1.6 | 0.1 |
| G021469 | | | | | | |
| mRNA Z | Mean | 96.6 | 93.4 | 85.5 | 73.6 | 36.0 |
| (Nme3Cas9) | SD | 0.1 | 1.1 | 2.3 | 5.8 | 2.0 |
| G028848 | | | | | | |

### Example 11. In Vitro Editing with Selected Guides in Primary Cynomolgus Monkey Hepatocytes (PCH)

[0576] Three NmeCas9 sgRNAs (G024739, G024741, and G024743) were selected for evaluation in a dose response assay. The tested NmeCas9 sgRNAs targeting the cynomolgus TTR gene include a 24-nucleotide guide sequence.

[0577] Unmodified and modified versions of the guides are provided in Table 25.

TABLE 25
Unmodified and modified versions of select gRNAs

| Guide ID | Unmodified sequence | Modified sequence |
|---|---|---|
| G024739 | AGGACCAGCCUCAGACACA | mA*mG*mG*mAmCCAmGmCCmUCmA |
| | AAUACGUUGUAGCUCCCUG | GACAmCAAAmUACmGUUGmUmAmG |
| | AAACCGUUGCUACAAUAAG | mCUCCCmUmGmAmAmAmCmCGUUm |
| | GCCGUCGAAAGAUGUGCCG | GmCUAmCAAU*AAGmGmCCmGmUmC |
| | CAACGCUCUGCCUUCUGGC | mGmAmAmAmGmAmUGUGCmCGmCA |
| | AUCGUU (SEQ ID NO: 509) | AmCGCUCUmGmCCmUmUmCmUGGCA |
| | | UCG*mU*mU (SEQ ID NO: 456) |
| G024741 | CUGCCUCGGACGGCAUCUA | mC*mU*mG*mCmCUCmGmGAmCGmG |
| | GAACUGUUGUAGCUCCCUG | CAUCmUAGAmACUmGUUGmUmAmG |
| | AAACCGUUGCUACAAUAAG | mCUCCCmUmGmAmAmAmCmCGUUm |
| | GCCGUCGAAAGAUGUGCCG | GmCUAmCAAU*AAGmGmCCmGmUmC |
| | CAACGCUCUGCCUUCUGGC | mGmAmAmAmGmAmUGUGCmCGmCA |
| | AUCGUU (SEQ ID NO: 510) | AmCGCUCUmGmCCmUmUmCmUGGCA |
| | | UCG*mU*mU (SEQ ID NO: 457) |
| G024743 | AGGCAGAGGAGGAGCAGA | mA*mG*mG*mCmAGAmGmGAmGGmA |
| | CGAUGAGUUGUAGCUCCCU | GCAGmACGAmUGAmGUUGmUmAmG |
| | GAAACCGUUGCUACAAUAA | mCUCCCmUmGmAmAmAmCmCGUUm |
| | GGCCGUCGAAAGAUGUGCC | GmCUAmCAAU*AAGmGmCCmGmUmC |
| | GCAACGCUCUGCCUUCUGG | mGmAmAmAmGmAmUGUGCmCGmCA |
| | CAUCGUU (SEQ ID NO: 511) | AmCGCUCUmGmCCmUmUmCmUGGCA |
| | | UCG*mU*mU (SEQ ID NO: 458) |

[0578] gRNAs and Cas9 mRNA were lipofected, as described below, into primary cynomolgus hepatocytes (PCH). PCH (In Vitro ADMET Laboratories 10136011) were prepared as described in Example 1. PCH were plated at a density of 40,000 cells/well. LNP formulations were prepared as described in Example 1. LNPs were prepared with the lipid composition at a molar ratio of 50% lipid A, 38% cholesterol, 9% DSPC, and 3% PEG2k-DMG. The LNPs were formulated with a lipid amine to RNA phosphate (N:P) molar ratio of about 6 and a gRNA as indicated in Table 25. PCH in 100 μL media were treated with an 8-point, 4-fold dilution series of LNP containing sgRNA, starting at 70 ng, and a fixed 30 ng dose of LNP encapsulating mRNA O by mRNA weight. The sgRNA concentration in each well is indicated in Table 26. The cells were lysed 72 hours post-treatment and NGS analysis was performed as described in Example 1. Dose response of editing efficiency to guide concentration was measured in triplicate samples. Table 26 and FIG. 20 shows mean percent editing and standard deviation (SD) at each guide concentration.

TABLE 26
Mean percent indels at TTR following editing in PCH.

| | | | |
|---|---|---|---|
| Guide LNP | G024739 | G024741 | G024743 |

| (ng/μL) | Mean | SD | Mean | SD | Mean | SD |
|---|---|---|---|---|---|---|
| 0.7 | 79.0 | 1.7 | 63.5 | 3.7 | 42.6 | 1.1 |
| 0.2 | 56.8 | 2.4 | 17.4 | 1.2 | 25.4 | 2.3 |
| 0.04 | 27.2 | 3.6 | 2.3 | 0.5 | 9.8 | 0.5 |
| 0.01 | 9.5 | 1.8 | 0.6 | 0.1 | 3.6 | 0.5 |
| 0.003 | 3.5 | 0.9 | 0.3 | 0.1 | 0.7 | 0.3 |
| 0.0007 | 0.9 | 0.3 | 0.1 | 1.3 | 0.3 | 0.1 |
| 0.0002 | 0.4 | 0.1 | 0.1 | 0.0 | 0.0 | 0.0 |
| 0.00004 | 0.2 | 0.0 | 0.1 | 1.3 | 0.0 | 0.0 |

### Example 12. In Vitro Editing of LNPs Using mRNA Dilution Series in PCH

[0579] Modified sgRNAs having the same targeting site in the cynomolgus TTR gene were assayed to evaluate the editing efficiency in PCH of different mRNAs (mRNA O, mRNA AA) and formulation ratios. PCH (In Vitro ADMET Laboratories, 10136011) were prepared, treated, and analyzed as described in this example as in Example 1 unless otherwise noted. PCH were used and plated at a density of 50,000 cells/well. LNP formulations were prepared as described in Example 1. LNPs were prepared with a lipid composition having a molar ratio of 50% lipid A, 38% cholesterol, 9% DSPC, and 3% PEG2k-DMG. The LNPs were formulated with a lipid amine to RNA phosphate (N:P) molar ratio of about 6 and a gRNA as indicated in Table 27. PCH in 100 μL media were treated with an 8-point, 3-fold serial dilution of mixed (separately formulated) or co-formulated LNP with various ratios of gRNA:mRNA. The top dose was 3 ng/μL total RNA by weight and gRNA:mRNA ratios for the dilution series were as indicated in Table 27. Samples were run in triplicate. Mean percent editing, standard deviation (SD), and a calculated EC50 are shown in Table 27 and in FIG. 21.

TABLE 27
Mean percent indels at the TTR locus following editing in PCH.

| | | LNP (ng/μL) | | | | | | | | EC50 |
|---|---|---|---|---|---|---|---|---|---|---|
| | | 3 | 1 | 0.33 | 0.11 | 0.04 | 0.01 | 0.004 | 0.001 | (ng/μL) |
| G024739:mRNA | Mean | 64 | 64.3 | 45.7 | 25.6 | 6.5 | 1.6 | 0.2 | 0.1 | 0.17 |
| O LNPs Mixed | % | | | | | | | | | |
| 2:1 | editing | | | | | | | | | |
| | SD | 6.9 | 12.8 | 5.1 | 8.5 | 2.0 | 0.9 | 0.0 | 1.3 | |
| G024739:mRNA | Mean | 58.2 | 69.2 | 46.5 | 29.3 | 7.4 | 0.6 | 0.1 | 0.0 | 0.13 |
| AA LNPs Mixed | % | | | | | | | | | |
| 2:1 | editing | | | | | | | | | |
| | SD | 4.5 | 12.2 | 13.8 | 7.6 | 3.3 | 0.3 | 0.0 | 0.0 | |
| G024739:mRNA | Mean | 56.5 | 67.1 | 53.4 | 25.4 | 5.8 | 0.7 | 0.1 | 0.0 | 0.13 |
| AA LNPs Mixed | % | | | | | | | | | |
| 1:2 | editing | | | | | | | | | |
| | SD | 4.7 | 10.9 | 16.0 | 11.7 | 2.4 | 0.5 | 0.0 | 0.0 | |
| G024739:mRNA | Mean | 61.3 | 59.2 | 47.0 | 27.2 | 7.2 | 0.4 | 0.1 | 0.1 | 0.14 |
| O Coformulated | % | | | | | | | | | |
| 2:1 | editing | | | | | | | | | |
| | SD | 4.4 | 9.3 | 13.2 | 8.4 | 2.2 | 0.2 | 0.0 | 0.0 | |
| G024739:mRNA | Mean | 58.2 | 69.6 | 56.4 | 35.3 | 7.2 | 1.2 | 0.2 | 0.1 | 0.10 |
| AA | % | | | | | | | | | |
| Coformulated | editing | | | | | | | | | |
| 2:1 | SD | 3.0 | 14.4 | 11.4 | 11.4 | 3.3 | 0.4 | 0.1 | 1.3 | |
| G024739:mRNA | Mean | 47.0 | 62.8 | 56.1 | 38 | 12.3 | 1.3 | 0.1 | 0.1 | 0.07 |
| AA | % | | | | | | | | | |
| Coformulated | editing | | | | | | | | | |
| 1:2 | SD | 5.8 | 10.5 | 15.3 | 13.9 | 4.3 | 0.1 | 0.0 | 1.3 | |

### Example 13. In Vivo Editing with NmeCas9 gRNA

[0580] The editing efficiency of the modified gRNAs was tested with Nme2Cas9 construct in mice. All Nine sgRNAs tested comprised the same 24 nt guide sequence targeting the mouse TTR gene (mTTR).

[0581] LNPs were generally prepared as described in Example 1 with a cargo of 1:2 by weight of gRNA to mRNA O. The LNPs used were prepared with a molar ratio of 50% Lipid A, 38% cholesterol, 9% DSPC, and 3% PEG2k-DMG. The LNPs were formulated with a lipid amine to RNA phosphate (N:P) molar ratio of about 6. Dose was calculated based on the combined RNA weight of gRNA and mRNA. Transport and storage solution (TSS) used in LNP preparation was dosed in the experiment as a vehicle-only negative control.

[0582] CD-1 female mice, about 6-8 weeks old, were used in each study involving mice. Animals were fed regular chow with standard upkeep. Animals were weighed before dose administration. TSS and LNP formulations were administered intravenously via tail vein injection with a dosage of 0.03 mpk. Animals were periodically observed for adverse effects for at least 24 hours post-dose. Fourteen days after treatment, animals were euthanized by cardiac exsanguination under isoflurane anesthesia; blood for serum preparation and liver tissue were collected for downstream analysis.

[0583] Serum TTR levels shown in Table 28 and FIG. 22 were produced using Serum TTR ELISA—Prealbumin ELISA (Aviva Systems; cat #OKIA00111) according to the manufacturer's protocol for all experimental groups and compared to the negative control (TSS).

TABLE 28
Serum TTR levels (ug/ml).

| | Serum TTR | | | |
|---|---|---|---|---|
| Guide ID | (ug/ml) | SD | % TSS | N |
| TSS | 673.7 | 44.13 | 100 | 5 |
| G021536 | 378.2 | 83.0 | 56.1 | 7 |
| G029377 | 419.3 | 83.5 | 62.2 | 9 |
| G029384 | 270.1 | 63.90 | 40.1 | 4 |
| G029392 | 375.4 | 58.23 | 55.7 | 4 |
| G029391 | 509.1 | 115.3 | 75.6 | 4 |
| G029390 | 623.2 | 144.3 | 92.5 | 4 |

[0584] Liver biopsy punches weighing between 5 and 15 mg were collected for isolation of genomic DNA. Genomic DNA was extracted using a DNA isolation kit (ZymoResearch, D3012) and samples were analyzed with NGS sequencing as described in Example 1. The editing efficiency for LNPs containing the indicated gRNAs are shown in Table 29 and illustrated in FIG. 23.

TABLE 29
Mean percent indels at the TTR locus in mouse liver samples

| Guide | Mean % editing | SD | N |
|---|---|---|---|
| TSS | 0.1 | 0 | 5 |
| G021536 | 27.2 | 4.58 | 7 |
| G029377 | 25.7 | 6.77 | 9 |
| G029384 | 34.9 | 4.05 | 4 |
| G029392 | 20.9 | 6.14 | 4 |
| G029391 | 5.4 | 2.60 | 4 |
| G029390 | 5.5 | 3.66 | 4 |

### Example 14. Dose Response Curve for NmeCas9 gRNA in PMH with Nme2Cas9

[0585] The editing efficiency of the modified gRNAs was tested with Nme2Cas9 construct in primary mouse hepatocytes (PMH). All Nine sgRNAs tested comprised the same 24nt guide sequence targeting the mouse TTR gene (mTTR).

[0586] PMH (Gibco, Lot MC931) were thawed and resuspended in hepatocyte thawing medium followed by centrifugation. The supernatant was discarded and the pelleted cells were resuspended in hepatocyte plating medium (William's E Medium (Gibco, Cat. A12176-01)) with plating supplements dexamethasone+cocktail supplement (Gibco, Cat. A15563, Lot 2459010) and FBS content (Gibco, Cat. A13450, Lot 2486425). Cells were counted and plated on Bio-coat collagen I coated 96-well plates (Corning, Ref 356407, Lot 08722018) at a concentration of 15,000 cells/well. Plated cells were allowed to settle and adhere for 4-6 hours in a tissue culture incubator at 37° C. and 5% CO2 atmosphere. After incubation cells were checked for monolayer formation and were washed once with hepatocyte maintenance medium (William's E Medium) with plating medium supplement (Gibco, Cat. A15564, Lot 2459014).

[0587] LNPs were generally prepared as described in Example 1 with a cargo of 1:2 by weight of gRNA to mRNA O. The LNPs used were prepared with a molar ratio of 50% Lipid A, 38% cholesterol, 9% DSPC, and 3% PEG2k-DMG. The LNPs were formulated with a lipid amine to RNA phosphate (N:P) molar ratio of 6. Each LNP was applied to cells using an 8 point 3-fold serial dilution starting at 450 ng of total cargo per 100 μl well at the top dose (300 ng mRNA 0 and 46.5 nM gRNA (about 150 ng gRNA))) as shown in Table 30. Upon treatment with LNPs, cells were incubated for 24 hours at 37° C. in William's E Medium with plating medium supplement (Gibco, Cat. A15564, Lot 2459014) and 3% fetal bovine serum. After 72 hours, cells were harvested and analyzed by NGS as described in Example 1.

[0588] The editing efficiency for LNPs containing the indicated gRNAs, and the corresponding EC50 for each, are shown in Table 30 and illustrated in FIG. 24.

TABLE 30
Mean percent indels at the TTR locus in primary mouse hepatocytes.

| | | | | | | | | | | EC50 |
|---|---|---|---|---|---|---|---|---|---|---|
| | % | nM gRNA | | | | | | | | (nM |
| Guide | indels | 46.5 | 15.5 | 5.1 | 1.7 | 0.5 | 0.19 | 0.064 | 0.02 | gRNA) |
| G021536 | Mean | 97.20 | 97.83 | 97.73 | 96.75 | 95.55 | 83.83 | 48.33 | 15.53 | 0.071 |
| | SD | 0.63 | 0.25 | 0.45 | 1.70 | 0.50 | 2.17 | 4.99 | 0.90 | |
| | N | 4.00 | 4.00 | 4.00 | 4.00 | 4.00 | 4.00 | 4.00 | 4.00 | |
| G029377 | Mean | 96.65 | 96.68 | 96.90 | 96.73 | 93.63 | 83.65 | 46.88 | 16.73 | 0.075 |
| | SD | 0.82 | 1.42 | 1.04 | 0.59 | 2.40 | 1.92 | 3.14 | 1.05 | |
| | N | 4.00 | 4.00 | 4.00 | 4.00 | 4.00 | 4.00 | 4.00 | 4.00 | |
| G029380 | Mean | 95.90 | 97.00 | 96.08 | 95.55 | 88.38 | 62.00 | 22.85 | 5.38 | 0.136 |
| | SD | 2.27 | 0.99 | 1.23 | 1.28 | 2.04 | 0.84 | 1.47 | 1.05 | |
| | N | 4.00 | 4.00 | 4.00 | 4.00 | 4.00 | 4.00 | 4.00 | 4.00 | |
| G029379 | Mean | 97.13 | 96.75 | 96.43 | 95.20 | 90.65 | 62.20 | 22.00 | 5.33 | 0.139 |
| | SD | 0.49 | 1.33 | 1.11 | 1.16 | 1.61 | 1.47 | 1.64 | 0.43 | |
| | N | 4.00 | 4.00 | 4.00 | 4.00 | 4.00 | 4.00 | 4.00 | 4.00 | |
| G029378 | Mean | 95.88 | 97.00 | 96.05 | 94.90 | 87.05 | 53.03 | 16.28 | 3.40 | 0.172 |
| | SD | 1.54 | 0.94 | 1.15 | 1.56 | 2.00 | 2.00 | 1.37 | 0.86 | |
| | N | 4.00 | 4.00 | 4.00 | 4.00 | 4.00 | 4.00 | 4.00 | 4.00 | |
| G029381 | Mean | 97.08 | 96.05 | 96.65 | 95.50 | 87.90 | 52.28 | 16.83 | 3.40 | 0.175 |
| | SD | 0.82 | 1.95 | 0.93 | 0.94 | 1.71 | 3.03 | 2.35 | 0.48 | |
| | N | 4.00 | 4.00 | 4.00 | 4.00 | 4.00 | 4.00 | 4.00 | 4.00 | |

### Example 15. Dose Response Curve for NmeCas9 gRNA in PMH with Nme2Cas9

[0589] The editing efficiency of the modified gRNAs was tested with Nme2Cas9 construct in primary mouse hepatocytes (PMH). All Nine sgRNAs tested comprised the same 24nt guide sequence targeting the mouse TTR gene (mTTR).

[0590] PMH (Gibco, Lot MC931) were thawed and resuspended in hepatocyte thawing medium followed by centrifugation. The supernatant was discarded and the pelleted cells were resuspended in hepatocyte plating medium (William's E Medium (Gibco, Cat. A12176-01)) with plating supplements dexamethasone+cocktail supplement (Gibco, Cat. A15563, Lot 2459010) and FBS content (Gibco, Cat. A13450, Lot 2486425). Cells were counted and plated on Bio-coat collagen I coated 96-well plates (Corning, Ref 356407, Lot 08722018) at a concentration of 15,000 cells/well. Plated cells were allowed to settle and adhere for 4-6 hours in a tissue culture incubator at 37° C. and 5% CO₂ atmosphere. After incubation cells were checked for monolayer formation and were washed once with hepatocyte maintenance medium (William's E Medium) with plating medium supplement (Gibco, Cat. A15564, Lot 2459014).

[0591] LNPs were generally prepared as described in Example 1 with a cargo of 1:2 by weight of gRNA to mRNA O. The LNPs used were prepared with a molar ratio of 50% Lipid A, 38% cholesterol, 9% DSPC, and 3% PEG2k-DMG. The LNPs were formulated with a lipid amine to RNA phosphate (N:P) molar ratio of 6. Each LNP was applied to cells using an 8 point 3-fold serial dilution starting at 450 ng of total cargo per 100 μl well at the top dose (300 ng mRNA O and 46.5 nM gRNA (i.e., 150 ng gRNA)) as shown in Table 31. Upon treatment with LNPs, cells were incubated for 24 hours at 37° C. in William's E Medium with plating medium supplement (Gibco, Cat. A15564, Lot 2459014) and 3% fetal bovine serum. Samples were run in triplicates After 72 hours, cells were harvested and analyzed by NGS as described in Example 1.

[0592] The editing efficiency for LNPs containing the indicated gRNAs, and the corresponding EC50 for each, as shown in Table 31 and illustrated in FIG. 25.

TABLE 31
Mean percent indels at the TTR locus in primary mouse hepatocytes.

| | | | | | | | | | | EC50 |
|---|---|---|---|---|---|---|---|---|---|---|
| | % | nM gRNA | | | | | | | | (nM |
| Guide | indels | 46.5 | 15.5 | 5.1 | 1.7 | 0.5 | 0.19 | 0.064 | 0.02 | gRNA) |
| G029384 | Mean | 96.70 | 97.30 | 96.57 | 95.37 | 92.70 | 78.67 | 43.77 | 13.87 | 0.077 |
| | SD | 0.85 | 0.52 | 1.71 | 1.01 | 1.95 | 3.73 | 4.00 | 1.50 | |
| | N | 3.00 | 3.00 | 3.00 | 3.00 | 3.00 | 3.00 | 3.00 | 3.00 | |
| G021536 | Mean | 97.13 | 96.91 | 96.58 | 95.77 | 90.42 | 73.29 | 36.63 | 10.49 | 0.092 |
| | SD | 0.00 | 0.23 | 0.03 | 0.76 | 1.26 | 1.96 | 1.53 | 0.10 | |
| | N | 18.00 | 18.00 | 18.00 | 18.00 | 18.00 | 18.00 | 18.00 | 18.00 | |
| G029383 | Mean | 96.93 | 96.83 | 96.13 | 94.37 | 90.50 | 73.20 | 34.77 | 9.07 | 0.094 |
| | SD | 0.90 | 1.08 | 2.21 | 2.75 | 3.05 | 2.92 | 2.23 | 0.91 | |
| | N | 3.00 | 3.00 | 3.00 | 3.00 | 3.00 | 3.00 | 3.00 | 3.00 | |
| G029388 | Mean | 96.60 | 97.03 | 96.67 | 95.23 | 89.63 | 71.13 | 34.07 | 9.90 | 0.100 |
| | SD | 0.95 | 0.98 | 2.05 | 2.80 | 0.76 | 2.75 | 3.74 | 3.12 | |
| | N | 3.00 | 3.00 | 3.00 | 3.00 | 3.00 | 3.00 | 3.00 | 3.00 | |
| G029392 | Mean | 96.57 | 95.87 | 96.60 | 95.23 | 90.30 | 72.50 | 31.13 | 6.87 | 0.101 |
| | SD | 1.47 | 2.03 | 1.47 | 2.72 | 3.15 | 1.56 | 1.74 | 0.81 | |
| | N | 3.00 | 3.00 | 3.00 | 3.00 | 3.00 | 3.00 | 3.00 | 3.00 | |
| G029382 | Mean | 96.83 | 97.37 | 96.50 | 95.87 | 89.43 | 69.10 | 33.80 | 9.87 | 0.104 |
| | SD | 0.67 | 0.47 | 1.30 | 1.12 | 3.41 | 4.92 | 4.06 | 0.61 | |
| | N | 3.00 | 3.00 | 3.00 | 3.00 | 3.00 | 3.00 | 3.00 | 3.00 | |
| G029386 | Mean | 97.17 | 97.20 | 96.23 | 95.80 | 91.70 | 71.53 | 32.57 | 9.43 | 0.105 |
| | SD | 0.55 | 1.13 | 0.38 | 1.32 | 0.95 | 0.61 | 1.62 | 0.93 | |
| | N | 3.00 | 3.00 | 3.00 | 3.00 | 3.00 | 3.00 | 3.00 | 3.00 | |
| G029385 | Mean | 96.80 | 95.90 | 96.67 | 94.87 | 87.83 | 66.95 | 25.60 | 7.20 | 0.123 |
| | SD | 0.80 | 0.14 | 1.23 | 1.53 | 3.11 | 2.47 | 2.52 | 0.87 | |
| | N | 3.00 | 3.00 | 3.00 | 3.00 | 3.00 | 3.00 | 3.00 | 3.00 | |
| G029387 | Mean | 94.07 | 95.65 | 95.23 | 94.00 | 81.90 | 56.83 | 22.67 | 5.97 | 0.149 |
| | SD | 0.15 | 0.35 | 0.71 | 0.56 | 2.69 | 1.80 | 0.47 | 0.49 | |
| | N | 3.00 | 3.00 | 3.00 | 3.00 | 3.00 | 3.00 | 3.00 | 3.00 | |
| G029391 | Mean | 95.70 | 95.77 | 95.43 | 94.30 | 85.40 | 56.03 | 19.83 | 4.70 | 0.156 |
| | SD | 1.40 | 2.49 | 2.98 | 2.96 | 3.03 | 2.62 | 2.40 | 0.69 | |
| | N | 3.00 | 3.00 | 3.00 | 3.00 | 3.00 | 3.00 | 3.00 | 3.00 | |
| G029389 | Mean | 96.80 | 96.40 | 95.87 | 94.60 | 85.53 | 54.23 | 17.63 | 3.40 | 0.164 |
| | SD | 1.14 | 0.99 | 2.32 | 1.93 | 2.16 | 4.05 | 1.75 | 0.62 | |
| | N | 3.00 | 3.00 | 3.00 | 3.00 | 3.00 | 3.00 | 3.00 | 3.00 | |
| G029390 | Mean | 96.00 | 95.40 | 94.60 | 93.07 | 77.60 | 42.13 | 11.70 | 2.20 | 0.219 |
| | SD | 1.49 | 3.49 | 3.97 | 2.97 | 2.29 | 4.10 | 2.49 | 0.70 | |
| | N | 3.00 | 3.00 | 3.00 | 3.00 | 3.00 | 3.00 | 3.00 | 3.00 | |

### Example 16. In Vitro Editing in Primary Mouse Hepatocytes (PMH) with Dilution Curve

### A. Example 16.1. Modified sgRNA Evaluation Using Dilution Series

[0593] Modified sgRNAs with various scaffold structures, all targeting a previously published site in the mouse pcsk9 gene (see WO2019094791) were designed as shown in Tables 1-2 and tested for editing efficiency using in primary mouse hepatocytes (PMH). Cells were prepared as described in Example 1 using PMH cells (In Vitro ADMET Laboratories) and plated at a density of 20,000 cells/well. Cells were transfected using MessengerMax (Invitrogen) according to the manufacturer's protocols with 1 ng/ul Nme2 Cas9 mRNA (mRNA U) and sgRNA at concentrations as indicated in Table 32. Duplicate samples were included in the assay. Cells were harvested 72 hours following transfection and analyzed by NGS as described in Example 1. Mean percent editing with standard deviation are shown in Table 32 and FIG. 26.

TABLE 32
Mean percent editing in PMH

| Guide | G017564 | | G017565 | | G017566 | |
|---|---|---|---|---|---|---|
| concentration | Mean % | | Mean % | | Mean % | |
| (nM) | editing | SD | editing | SD | editing | SD |
| 50.0 | 25.7 | 3.2 | 25.6 | 4.9 | 27.7 | 0.4 |
| 25.0 | 27.8 | 1.4 | 20.0 | 1.7 | 26.4 | 4.7 |
| 12.5 | 15.3 | 1.7 | 12.9 | 0.8 | 18.2 | 1.7 |
| 6.3 | 10.6 | 0.6 | 8.7 | 0.9 | 12.6 | 0.9 |
| 3.1 | 5.3 | 0.2 | 3.6 | 0.3 | 6.7 | 0.7 |
| 1.6 | 5.0 | 1.1 | 3.6 | 0.6 | 4.8 | 0.2 |
| 0.8 | 1.3 | 0.5 | 0.2 | 0.1 | 2.8 | 0.3 |
| 0.4 | 0.8 | 0.3 | 0.5 | 0.1 | 1.8 | 0.1 |
| 0.2 | 0.3 | 0.1 | 0.2 | 0.1 | 0.7 | 0.1 |
| 0.1 | 0.1 | 0.0 | 0.1 | 0.1 | 0.2 | 0.1 |
| 0.0 | 0.1 | 0.0 | 0.0 | 0.0 | 0.3 | 0.1 |

### B. Example 16.2. Evaluation of mRNA Poly-A Tail Modifications and Cargo Ratios

[0594] An sgRNA targeting the mouse psck9 gene was selected from Table 32 to evaluate guide editing efficiency resulting from particular combinations of poly-A tail modifications and sgRNA:mRNA ratios. PMH cells used were prepared, treated, and analyzed as described in Example 1 unless otherwise noted. PMH (Gibco) were plated at a density of 15,000 cells/well.

[0595] LNPs were generally prepared as described in Example 1. LNPs were prepared with the lipid composition of 50/9/38/3, expressed as the molar ratio of ionizable lipid A/cholesterol/DSPC/PEG, respectively. The LNPs were formulated with a lipid amine to RNA phosphate (N:P) molar ratio of about 6. LNPs encapsulated gRNA G017566 or one of three mRNAs encoding the same Nme2Cas9 open reading frame (ORF) but with different encoded poly-A tails, as indicated in Table 33. A preliminary experiment holding the sgRNA application constant and varying the amount of mRNA applied showed that 1:1 sgRNA:mRNA ratio by weight resulted in the highest percent editing. In the current Example, increasing doses mRNA LNP and gRNA LNP were applied to cells in 100 ul media as described in Table 33, maintaining a 1:1 sgRNA:mRNA ratio by weight. Table 33 and FIG. 27 show mean percent editing and standard deviation (SD).

TABLE 33
Mean percent editing in PMH

| mRNA C | mRNA B | mRNA D |
|---|---|---|
| SEQ ID NO: | SEQ ID | SEQ ID NO: |
| 622 | NO: 621 | 623 |

| Total | Mean | | Mean | | Mean | |
|---|---|---|---|---|---|---|
| RNA | % | | % | | % | |
| (ng) | editing | SD | editing | SD | editing | N |
| 333. | 49.1 | 0.9 | 44.3 | 0.0 | 39.6 | 1 |
| 111. | 37.5 | 3.2 | 43.4 | 0.2 | 30.3 | 1 |
| 37. | 12.8 | 0.2 | 15.6 | 1.0 | 9.3 | 1 |
| 12.3 | 1.3 | 0.2 | 2.2 | 0.0 | 1.1 | 1 |
| 4.1 | 0.1 | 0.0 | 0.2 | 0.0 | 0.0 | 1 |
| 1.4 | 0.1 | 0.0 | 0.0 | 0.0 | 0.1 | 1 |
| 0.5 | 0.1 | 0.0 | 0.1 | 0.1 | 0.0 | 1 |

### Example 17. Dose Response Curve for NmeCas9 gRNA in PMH with Nme2Cas9

[0596] The editing efficiency of the modified gRNAs was tested with Nme2Cas9 construct in primary mouse hepatocytes (PMH). All Nine sgRNAs tested comprised the same 24nt guide sequence targeting the mouse TTR gene (mTTR).

[0597] PMH (Gibco, Lot MC931) were thawed and resuspended in hepatocyte thawing medium with plating supplements (William's E Medium (Gibco, Cat. A12176-01)) with dexamethasone+cocktail supplement (Gibco, Cat. A15563, Lot 2019842) and Plating Supplements with FBS content (Gibco, Cat. A13450, Lot 1970698) followed by centrifugation. The supernatant was discarded, and the pelleted cells resuspended in hepatocyte plating medium plus supplement pack (Invitrogen, Cat. A1217601 and Gibco, Cat. CM3000). Cells were counted and plated on Bio-coat collagen I coated 96-well plates (Thermo Fisher, Cat. 877272) at a concentration of 15,000 cells/well. Plated cells were allowed to settle and adhere for 4-6 hours in a tissue culture incubator at 37° C. and 5% C02 atmosphere. After incubation cells were checked for monolayer formation and were washed once with hepatocyte maintenance medium (Invitrogen, Cat. A1217601 and Gibco, Cat. CM4000).

[0598] LNPs were generally prepared as described in Example 1 with a cargo of 1:2 by weight of gRNA to mRNA O. The LNPs used were prepared with a molar ratio of 50% Lipid A, 38% cholesterol, 9% DSPC, and 3% PEG2k-DMG. The LNPs were formulated with a lipid amine to RNA phosphate (N:P) molar ratio of 6. Each LNP was applied to cells using an 8 point 4-fold serial dilution starting at 300 ng of total RNA per 100 ul well (about 32.25 nM gRNA concentration per well) as shown in Table 32. Upon treatment with LNPs, cells were incubated for 24 hours at 37° C. in Williams' E Medium (Gibco, A1217601) with maintenance supplements and 3% fetal bovine serum. Samples were run in triplicate. After 72 hours, cells were harvested and analyzed by NGS as described in Example 1.

[0599] The editing efficiency for LNPs containing the indicated gRNAs, and the corresponding EC50 for each, are shown in Table 34 and illustrated in FIG. 28.

TABLE 34
Mean percent indels at the TTR locus in primary mouse hepatocytes.

| | | | | | | | | | | EC50 |
|---|---|---|---|---|---|---|---|---|---|---|
| | % | ng RNA | | | | | | | | (ng |
| Guide | indels | 300 | 75 | 18.75 | 4.68 | 1.17 | 0.29 | 0.07 | 0 | RNA) |
| G021536 | Mean | 97.7 | 96.4 | 90.9 | 43.1 | 13.9 | 1.3 | 0.3 | 0.0 | 5.23 |
| | SD | 0.5 | 0.3 | 5.0 | 10.1 | 6.5 | 0.7 | 0.1 | 0.0 | |
| G021844 | Mean | 96.7 | 96.9 | 93.8 | 60.6 | 27.2 | 4.0 | 0.5 | 0.3 | 2.86 |
| | SD | 0.8 | 0.3 | 1.9 | 7.5 | 13.4 | 2.7 | 0.3 | 0.1 | |
| G027492 | Mean | 97.1 | 96.5 | 95.2 | 64.3 | 30.2 | 6.2 | 0.5 | 0.0 | 2.49 |
| | SD | 1.4 | 0.4 | 1.6 | 13.4 | 15.9 | 3.5 | 0.4 | 0.1 | |
| G027493 | Mean | 96.5 | 94.9 | 82.7 | 32.4 | 8.6 | 0.9 | 0.0 | 0.0 | 6.95 |
| | SD | 0.1 | 0.6 | 6.4 | 6.2 | 5.5 | 0.8 | 0.1 | 0.0 | |
| G027494 | Mean | 96.0 | 91.7 | 78.3 | 19.6 | 6.7 | 0.7 | 0.0 | 0.0 | 9.06 |
| | SD | 1.0 | 2.2 | 8.9 | 7.6 | 4.0 | 0.4 | 0.1 | 0.0 | |
| G027495 | Mean | 96.0 | 94.6 | 83.8 | 22.0 | 11.6 | 1.8 | 0.2 | 0.1 | 8.31 |
| | SD | 0.5 | 1.8 | 6.8 | 9.5 | 7.3 | 1.8 | 0.1 | 0.1 | |
| G027496 | Mean | 96.2 | 93.2 | 77.8 | 13.2 | 5.4 | 0.4 | 0.1 | 0.0 | 10.22 |
| | SD | 0.7 | 2.9 | 8.4 | 3.4 | 2.7 | 0.4 | 0.1 | 0.0 | |

### Example 18. In Vivo Editing with NmeCas9 gRNA

[0600] The editing efficiency of the modified gRNAs was tested with Nme2Cas9 construct in mice. All Nine sgRNAs tested comprised the same 24 nt guide sequence targeting the mouse TTR gene (mTTR).

[0601] LNPs were generally prepared as described in Example 1 with a cargo of 1:2 by weight of gRNA to mRNA O. The LNPs used were prepared with a molar ratio of 50% Lipid A, 38% cholesterol, 9% DSPC, and 3% PEG2k-DMG. The LNPs were formulated with a lipid amine to RNA phosphate (N:P) molar ratio of about 6. Dose was calculated based on the combined RNA weight of gRNA and mRNA. Transport and storage solution (TSS) used in LNP preparation was dosed in the experiment as a vehicle-only negative control.

[0602] CD-1 female mice, about 6-8 weeks old, were used in each study involving mice (n=5 for all groups). Animals were fed regular chow with standard upkeep. Animals were weighed before dose administration. TSS and LNP formulations were administered intravenously via tail vein injection with a dosage of 0.03 mpk. Animals were periodically observed for adverse effects for at least 24 hours post-dose. Seven days after treatment, animals were euthanized by cardiac exsanguination under isoflurane anesthesia; blood for serum preparation and liver tissue were collected for downstream analysis.

[0603] Serum TTR levels shown in Table 35 and FIG. 29 were produced using Serum TTR ELISA—Prealbumin ELISA (Aviva Systems; cat #OKIA00111) according to the manufacturer's protocol. The level of serum TTR is significantly lower in all experimental groups compared to the negative control (TSS).

TABLE 35
Serum TTR levels (ug/ml).

| | Serum TTR | | |
|---|---|---|---|
| Guide ID | (ug/ml) | SD | % TSS |
| TSS | 704.9 | 98.3 | 100% |
| G021844 | 150.0 | 84.9 | 21% |
| G021536 | 371.1 | 95.6 | 53% |
| G027492 | 239.4 | 30.5 | 34% |
| G027493 | 423.4 | 170.0 | 60% |
| G027494 | 496.3 | 89.8 | 70% |
| G027495 | 263.6 | 68.9 | 37% |
| G027496 | 362.4 | 52.7 | 51% |

[0604] Liver biopsy punches weighing between 5 and 15 mg were collected for isolation of genomic DNA. Genomic DNA was extracted using a DNA isolation kit (ZymoResearch, D3012) and samples were analyzed with NGS sequencing (n=5 for all groups) as described in Example 1. The editing efficiency for LNPs containing the indicated gRNAs are shown in Table 36 and illustrated in FIG. 30.

TABLE 36
Mean percent indels at the TTR locus in mouse liver samples

| Guide | Mean | SD |
|---|---|---|
| TSS | 0.12 | 0.22 |
| G021844 | 57.1 | 5.7 |
| G021536 | 31.5 | 4.9 |
| G027492 | 51.3 | 10.4 |
| G027493 | 27.0 | 14.0 |
| G027494 | 17.6 | 8.6 |
| G027495 | 43.2 | 7.2 |
| G027496 | 23.5 | 8.6 |

### Example 19. In Vivo Editing with NmeCas9 gRNA

[0605] The editing efficiency of the modified gRNAs was tested with Nme2Cas9 mRNA in mice. All Nine sgRNAs tested comprised the same 24nt guide sequence targeting mTTR.

[0606] LNPs were generally prepared as described in Example 1 with a cargo of 1:2 by weight of gRNA to mRNA O. The LNPs used were prepared with a molar ratio of 50% Lipid A, 38% cholesterol, 9% DSPC, and 3% PEG2k-DMG. The LNPs were formulated with a lipid amine to RNA phosphate (N:P) molar ratio of about 6. Dose was calculated based on the combined RNA weight of gRNA and mRNA. Transport and storage solution (TSS) used in LNP preparation was dosed in the experiment as a vehicle-only negative control.

[0607] CD-1 female mice, about 6 weeks old, were used in each study involving mice (n=5 for all groups). Animals were weighed before dose administration for dose calculation, and 24 hours post-administration for monitoring. TSS and LNP formulations were administered intravenously via tail vein injection with a dosage of 0.01 mpk or 0.03 mpk. Animals were periodically observed for adverse effects for at least 24 hours post-dose. Seven days after treatment, animals were euthanized by cardiac exsanguination under isoflurane anesthesia. Blood was collected by cardiac puncture for Serum TTR ELISA, and liver tissue was collected for downstream analysis.

[0608] Serum TTR results prepared using Serum TTR ELISA—Prealbumin ELISA (Aviva Systems; cat #OKIA00111) according to the manufacturer's protocol are shown in FIG. 31 and Table 37.

TABLE 37
Serum TTR measurements following treatment.

| Guide ID | Dosage (mpk) | Serum TTR (ug/ml) | SD | N |
|---|---|---|---|---|
| Vehicle | | 663.5 | 61.5 | 5 |
| G021844 | 0.01 | 585.5 | 166.1 | 5 |
| | 0.03 | 205.8 | 99.2 | 5 |
| G021536 | 0.01 | 749.2 | 425.3 | 5 |
| | 0.03 | 252.6 | 50.2 | 4 |
| G027492 | 0.01 | 527.4 | 163.1 | 4 |
| | 0.03 | 266.0 | 92.4 | 5 |
| G027495 | 0.01 | 626.9 | 157.7 | 5 |
| | 0.03 | 310.0 | 118.1 | 5 |

[0609] Liver biopsy punches weighing about 5 mg-15 mg were collected for isolation of genomic DNA and total RNA. Genomic DNA was extracted using a DNA isolation kit (ZymoResearch, D3012) and samples were analyzed with NGS sequencing (n=5 for all groups) as described in Example 1. The editing efficiency for LNPs containing the indicated gRNAs are shown in Table 38 and illustrated in FIG. 32.

TABLE 38
Mean percent indels at the TTR locus in mouse liver samples.

| Guide ID | Dosage | Mean | SD | N |
|---|---|---|---|---|
| Vehicle | 0.00 | 0.1 | 0.07 | 5 |
| G021844 | 0.01 | 19.7 | 2.9 | 5 |
| | 0.03 | 49.6 | 7.9 | 5 |
| G021536 | 0.01 | 10.7 | 4.7 | 5 |
| | 0.03 | 34.4 | 4.1 | 4 |
| G027492 | 0.01 | 21.1 | 9.2 | 4 |
| | 0.03 | 44.6 | 9.4 | 5 |
| G027495 | 0.01 | 9.3 | 2.6 | 4 |
| | 0.03 | 30.2 | 10.9 | 5 |

### Example 20. Additional Embodiments

[0610] The following numbered items provide additional support for and descriptions of the embodiments herein.

[0611] Item 1 is a polynucleotide comprising an open reading frame (ORF), the ORF comprising: a nucleotide sequence encoding a C-terminal N. meningitidis (Nine) Cas9 polypeptide at least 90% identical to any one of SEQ ID NOs: 29, 32-41, 224-226, 231-233, 238-240, 245-247, 252-254, 259-261, 266-268, 273-275, 280-282, 287-289, 294-296, 301-303, or 316-321, wherein the Nine Cas9 is an Nme2 Cas9, an Nme1 Cas9, or Nme3 Cas9; and a nucleotide sequence encoding a first nuclear localization signal (NLS).

[0612] Item 2 is the polynucleotide of Item 1, wherein the ORF further comprises a nucleotide sequence encoding a second NLS.

[0613] Item 3 is the polynucleotide of Item 1, wherein the first and second NLS are independently selected from SEQ ID NO: 388 and 410-422.

[0614] Item 4 is the polynucleotide of any one of the preceding Items, wherein the polynucleotide further comprises a polyA sequence or a polyadenylation signal sequence.

[0615] Item 5 is the polynucleotide of Item 4, wherein the polyA sequence comprises non-adenine nucleotides.

[0616] Item 6 is the polynucleotide of Item of any one of Items 4-5, wherein the polyA sequence comprises 100-400 nucleotides.

[0617] Item 7 is the polynucleotide of Item of any one of Items 4-6, wherein the polyA sequence comprises a sequence of SEQ ID NO: 409.

[0618] Item 8 is the polynucleotide of any one of the preceding Items, wherein the ORF further comprises a nucleotide sequence encoding a linker sequence between the first NLS and the second NLS.

[0619] Item 9 is the polynucleotide of any one of the preceding Items, wherein the ORF further comprises a nucleotide sequence encoding a linker spacer sequence between the Nine Cas9 coding sequence and the NLS proximal to the Nine Cas9 coding sequence.

[0620] Item 10 is the polynucleotide of Item of any one of Items 8-9, wherein the linker comprises at least 1, at least 2, at least 3, at least 4, at least 5, at least 6, at least 7, at least 8, at least 9, or at least 10 amino acids.

[0621] Item 11 is the polynucleotide of Item of any one of Items 8-10, wherein the linker sequence comprises GGG or GGGS, optionally wherein the GGG or GGGS sequence is at the N-terminus of the spacer sequence.

[0622] Item 12 is the polynucleotide of Item of any one of Items 8-11, wherein the linker sequence comprises a sequence of any one of SEQ ID NOs: 61-122.

[0623] Item 13 is the polynucleotide of any one of the preceding Items, wherein the ORF further comprises one or more additional heterologous functional domains.

[0624] Item 14 is the polynucleotide of any one of the preceding Items, wherein the Nine Cas9 has double stranded endonuclease activity.

[0625] Item 15 is the polynucleotide of any one of Items 1-14, wherein the Nine Cas9 has nickase activity.

[0626] Item 16 is the polynucleotide of any one of Items 1-14, wherein the Nine Cas9 comprises a dCas9 DNA binding domain.

[0627] Item 17 is the polynucleotide of any one of the preceding Items, wherein the NmeCas9 comprises an amino acid sequence with at least 91%, 92%, 93%, 94%, 95%, 96%, 97%, 98%, or 99% to any one of SEQ ID NOs: 1 and 4-13, 220, 227, 234, 241, 248, 255, 262, 269, 276, 283, 290, 297, or 310-315.

[0628] Item 18 is the polynucleotide of any one of the preceding Items wherein the NmeCas9 comprises an amino acid sequence of SEQ ID NO: 1 and 4-13, 220, 227, 234, 241, 248, 255, 262, 269, 276, 283, 290, 297, or 310-315.

[0629] Item 19 is the polynucleotide of any one of the preceding Items, wherein the sequence encoding the NmeCas9 comprises a nucleotide sequence having at least 91%, 92%, 93%, 94%, 95%, 96%, 97%, 98%, or 99% identity to the nucleotide sequence of any one of SEQ ID NOs: 15, 18-27, 29, 32-41, 221-226, 228-233, 235-240, 242-247, 249-254, 256-261, 263-268, 270-275, 277-282, 284-289, 291-296, 298-303, 304-309, or 316-321.

[0630] Item 20 is the polynucleotide of any one of the preceding Items, wherein the sequence encoding the NmeCas9 comprises a nucleotide sequence of any one of SEQ ID NOs: 15, 18-27, 29, 32-41, 221-226, 228-233, 235-240, 242-247, 249-254, 256-261, 263-268, 270-275, 277-282, 284-289, 291-296, 298-303, 304-309, or 316-321.

[0631] Item 21 is a polynucleotide comprising an open reading frame (ORF) encoding a polypeptide comprising: a cytidine deaminase, which is optionally an APOBEC3A deaminase; a nucleotide sequence encoding a C-terminal N. meningitidis (Nine) Cas9 nickase polypeptide at least 90% identical to any one of SEQ ID NOs: 1 and 4-13, 220, 227, 234, 241, 248, 255, 262, 269, 276, 283, 290, or 297, wherein the Nine Cas9 nickase is an Nme2 Cas9 nickase, an Nme1 Cas9 nickase, or an Nme3 Cas9 nickase; and a nucleotide sequence encoding a first nuclear localization signal (NLS); wherein the polypeptide does not comprise a uracil glycosylase inhibitor (UGI).

[0632] Item 22 is the polynucleotide of Item 21, wherein the ORF further comprises a nucleotide sequence encoding a second NLS.

[0633] Item 23 is the polynucleotide of any one of Items 21-22, wherein the deaminase is located N-terminal to an NLS in the polypeptide.

[0634] Item 24 is the polynucleotide of any one of Items 21-23, wherein the cytidine deaminase is located N-terminal to the first NLS and the second NLS in the polypeptide.

[0635] Item 25 is the polynucleotide of any one of Items 21-22, wherein the cytidine deaminase is located C-terminal to an NLS in the polypeptide.

[0636] Item 26 is the polynucleotide of any one of Items 23-25, wherein the cytidine deaminase is located C-terminal to the first NLS and the second NLS in the polypeptide.

[0637] Item 27 is the polynucleotide of any one of Items 21-26, wherein the ORF does not comprise a coding sequence for an NLS C-terminal to the ORF encoding the Nine Cas9.

[0638] Item 28 is the polynucleotide of any one of Items 21-26, wherein the ORF does not comprise a coding sequence C-terminal to the ORF encoding the Nine Cas9.

[0639] Item 29 is the polynucleotide of any one of the preceding Items, wherein the cytidine deaminase comprises an amino acid sequence with at least 87% identity to SEQ ID NOs: 151.

[0640] Item 30 is the polynucleotide of any one of the preceding Items, wherein the cytidine deaminase comprises an amino acid sequence with at least 80% identity to SEQ ID NOs: 152-216.

[0641] Item 31 is the polynucleotide of any one of the preceding Items, wherein the cytidine deaminase comprises an amino acid sequence with at least 80% identity to SEQ ID NOs: 14.

[0642] Item 32 is the polynucleotide of any one of the preceding Items, the ORF comprises a nucleotide sequence at least 80% identical to SEQ ID NO: 42.

[0643] Item 33 is the polynucleotide of any one of the preceding Items, wherein the polynucleotide comprises a 5′ UTR with at least 90% identity to any one of SEQ ID NOs: 391-398.

[0644] Item 34 is the polynucleotide of any one of the preceding Items, wherein the polynucleotide comprises a 5′ UTR comprising any one of SEQ ID NOs: 391-398.

[0645] Item 35 is the polynucleotide of any one of the preceding Items, wherein the polynucleotide comprises a 3′ UTR with at least 90% identity to any one of SEQ ID NOs: 399-406.

[0646] Item 36 is the polynucleotide of any one of the preceding Items, wherein the polynucleotide comprises a 3′ UTR comprising any one of SEQ ID NOs: 399-306.

[0647] Item 37 is the polynucleotide of any one of the preceding Items, wherein the polynucleotide comprises a 5′ UTR and a 3′ UTR from the same source.

[0648] Item 38 is the polynucleotide of any one of the preceding Items, wherein the polynucleotide comprises a 5′ cap, optionally wherein the 5′ cap is Cap0, Cap1, or Cap2.

[0649] Item 39 is the polynucleotide of any one of the preceding Items, wherein at least 75%, 80%, 85%, 90%, 95%, 98%, 99%, or 100% of the codons of the ORF are minimal adenine codons or minimal uridine codons.

[0650] Item 40 is the polynucleotide of any one of the preceding Items, wherein the ORF comprises or consists of codons that increase translation of the mRNA in a mammal.

[0651] Item 41 is the polynucleotide of any one of the preceding Items, wherein the ORF comprises or consists of codons that increase translation of the mRNA in a human.

[0652] Item 42 is the polynucleotide of any one of the preceding Items, wherein the polynucleotide is an mRNA.

[0653] Item 43 is the polynucleotide of Item 42, wherein the ORF comprises a sequence having at least 90%, 95%, 98% or 100% identity to any one of SEQ ID NO: 29, 32-41, 224-226, 231-233, 238-240, 245-247, 252-254, 259-261, 266-268, 273-275, 280-282, 287-289, 294-296, 301-303, or 316-321.

[0654] Item 44 is the polynucleotide of any one of Items 42-43, wherein at least 10% of the uridine in the mRNA is substituted with a modified uridine.

[0655] Item 45 is the polynucleotide of any one of Items 42-43, wherein less than 10% of the uridine in the mRNA is substituted with a modified uridine.

[0656] Item 46 is the polynucleotide of Item 45, wherein the modified uridine is one or more of N1-methyl-pseudouridine, pseudouridine, 5-methoxyuridine, or 5-iodouridine.

[0657] Item 47 is the polynucleotide of Item 45, wherein the modified uridine is one or both of N1-methyl-pseudouridine or 5-methoxyuridine.

[0658] Item 48 is the polynucleotide of any one of Items 45-47, wherein the modified uridine is N1-methyl-pseudouridine.

[0659] Item 49 is the polynucleotide of any one of Items 45-47, wherein the modified uridine is 5-methoxyuridine.

[0660] Item 50 is the polynucleotide of any one of Items 44, and 36-49, wherein 15% to 45% of the uridine is substituted with the modified uridine.

[0661] Item 51 is the polynucleotide of Item 50, wherein at least 20% or at least 30% of the uridine is substituted with the modified uridine.

[0662] Item 52 is the polynucleotide of Item 51, wherein at least 80% or at least 90% of the uridine is substituted with the modified uridine.

[0663] Item 53 is the polynucleotide of Item 52, wherein 100% of the uridine is substituted with the modified uridine.

[0664] Item 54 is the polynucleotide of Item 42, wherein less than 10% of the nucleotides in the mRNA is substituted with a modified nucleotide.

[0665] Item 55 is a composition comprising the polynucleotide according to any one of the preceding Items, and at least one guide RNA (gRNA).

[0666] Item 56 is a composition comprising a first polynucleotide comprising a first open reading frame (ORF) encoding a polypeptide comprising a cytidine deaminase, optionally an APOBEC3A deaminase, and a NmeCas9 nickase, and a second polynucleotide comprising a second open reading frame encoding a uracil glycosylase inhibitor (UGI), wherein the second polynucleotide is different from the first polynucleotide, and optionally further comprising a guide RNA (gRNA).

[0667] Item 57 is the composition of Item 55 or 56, wherein the gRNA is a single guide RNA.

[0668] Item 58 is the composition of Item 55 or 56, wherein the gRNA is a dual guide RNA.

[0669] Item 59 is a composition comprising the polynucleotide according to any one of Items 1-57, further comprising a single guide RNA, wherein the single guide RNA comprises a guide region and a conserved region, wherein the conserved region comprising one or more of:
[0670] (a) a shortened repeat/anti-repeat region, wherein the shortened repeat/anti-repeat region lacks 2-24 nucleotides, wherein
   [0671] (i) one or more of nucleotides 37-48 and 53-64 is deleted and optionally one or more of nucleotides 37-64 is substituted relative to SEQ ID NO: 500; and
   [0672] (ii) nucleotide 36 is linked to nucleotide 65 by at least 2 nucleotides; or
[0673] (b) a shortened hairpin 1 region, wherein the shortened hairpin 1 lacks 2-10, optionally 2-8 nucleotides, wherein
   [0674] (i) one or more of nucleotides 82-86 and 91-95 is deleted and optionally one or more of positions 82-96 is substituted relative to SEQ ID NO: 500; and
   [0675] (ii) nucleotide 81 is linked to nucleotide 96 by at least 4 nucleotides; or
[0676] (c) a shortened hairpin 2 region, wherein the shortened hairpin 2 lacks 2-18, optionally 2-16 nucleotides, wherein
   [0677] (i) one or more of nucleotides 113-121 and 126-134 is deleted and optionally one or more of nucleotides 113-134 is substituted relative to SEQ ID NO: 500; and
   [0678] (ii) nucleotide 112 is linked to nucleotide 135 by at least 4 nucleotides;
[0679] wherein one or both nucleotides 144-145 are optionally deleted relative to SEQ ID NO: 500;
[0680] wherein at least 10 nucleotides are modified nucleotides.

[0681] Item 60 is a composition comprising the polynucleotide according to any one of Items 1-57, further comprising a single guide RNA, wherein the single guide RNA comprises a guide region and a conserved region, wherein the conserved region comprising one or more of:
[0682] (a) a shortened repeat/anti-repeat region, wherein the shortened repeat/anti-repeat region lacks 2-24 nucleotides, wherein
   [0683] (i) one or more of nucleotides 37-64 is deleted and optionally substituted relative to SEQ ID NO: 500; and
   [0684] (ii) nucleotide 36 is linked to nucleotide 65 by (i) a first internal linker that alone or in combination with nucleotides substitutes for 4 nucleotides, or (ii) at least 4 nucleotides; or
[0685] (b) a shortened hairpin 1 region, wherein the shortened hairpin 1 lacks 2-10, optionally 2-8 nucleotides, wherein
   [0686] (i) one or more of nucleotides 82-95 is deleted and optionally substituted relative to SEQ ID NO: 500; and
   [0687] (ii) nucleotide 81 is linked to nucleotide 96 by (i) a second internal linker that alone or in combination with nucleotides substitutes for 4 nucleotides, or (ii) at least 4 nucleotides; or
[0688] (c) a shortened hairpin 2 region, wherein the shortened hairpin 2 lacks 2-18, optionally 2-16 nucleotides, wherein
   [0689] (i) one or more of nucleotides 113-134 is deleted and optionally substituted relative to SEQ ID NO: 500; and
   [0690] (ii) nucleotide 112 is linked to nucleotide 135 by (i) a third internal linker that alone or in combination with nucleotides substitutes for 4 nucleotides, or (ii) at least 4 nucleotides;
[0691] wherein one or both nucleotides 144-145 are optionally deleted as compared to SEQ ID NO: 500;
[0692] wherein the gRNA comprises at least one of the first internal linker, the second internal linker, and the third internal linker.

[0693] Item 61 is a polypeptide encoded by the polynucleotide of any one of Items 1-60.

[0694] Item 62 is a vector comprising the polynucleotide of any one of Items 1-60.

[0695] Item 63 is an expression construct comprising a promoter operably linked to a sequence encoding the polynucleotide of any one of Items 1-60.

[0696] Item 64 is a plasmid comprising the expression construct of Item 63.

[0697] Item 65 is a host cell comprising the vector of Item 62, the expression construct of Item 63, or the plasmid of Item 64.

[0698] Item 66 is a pharmaceutical composition comprising the polynucleotide, composition, or polypeptide of any of the preceding Items and a pharmaceutically acceptable carrier.

[0699] Item 67 is a kit comprising the polynucleotide, composition, or polypeptide of any of the preceding Items.

[0700] Item 68 is use of the polynucleotide, composition, or polypeptide of any one of the preceding Items for modifying a target gene in a cell.

[0701] Item 69 is use of the polynucleotide, composition, or polypeptide of any one of the preceding Items for the manufacture of a medicament for modifying a target gene in a cell.

[0702] Item 70 is the polynucleotide or composition of any one of the preceding Items, wherein the polynucleotide or composition is formulated as a lipid nucleic acid assembly composition, optionally a lipid nanoparticle.

[0703] Item 71 is a method of modifying a target gene comprising delivering to a cell the polynucleotide, polypeptide, or composition of any one of the preceding Items.

[0704] Item 72 is a method of modifying a target gene, comprising delivering to the cell one or more lipid nucleic acid assembly compositions, optionally lipid nanoparticles, comprising the polynucleotide according to any one of Items 1-60, and one or more guide RNAs.

[0705] Item 73 is the method of any one of Items 71-72, wherein at least one lipid nucleic acid assembly composition comprises lipid nanoparticle (LNPs), optionally wherein all lipid nucleic acid assembly compositions comprise LNPs.

[0706] Item 74 is the method of any one of Items 71-72, wherein at least one lipid nucleic acid assembly composition is a lipoplex composition.

[0707] Item 75 is the composition or method of any one of Items 72-74, wherein the lipid nucleic acid assembly composition comprises an ionizable lipid.

TABLE 39A
Table of Sequences
The following sequence table provides a listing of sequences disclosed herein. It is understood that if a DNA sequence (comprising Ts)
is referenced with respect to an RNA, then Ts should be replaced with Us (which may be modified or unmodified depending on the context), and
vice versa. * = PS linkage; ′m′ = 2′-O-Me nucleotide. For ORF descriptions, BP = I-pair depleted; GP = E-pair enriched; BS = I-single
depleted; GS = E-single enriched; GCU = subjected to steps of minimizing uridines, minimizing repeats, and maximizing GC content. E-pairs,
I-pairs, E-singles, and I-singles refer, respectively, to the codon pairs or codons of Tables 1-4.

| Description | SEQ ID NO | sequence |
|---|---|---|
| Amino | 1 | MTGAAFKPNPINYILGLDIGIASVGWAMVEIDEEENPIRLIDLGVRVFERAEVPKTGDSLAMARRLARSVRRLTRRRAHRLLR |
| acid | | ARRLLKREGVLQAADFDENGLIKSLPNTPWQLRAAALDRKLTPLEWSAVLLHLIKHRGYLSQRKNEGETADKELGALLKGVAN |
| sequence | | NAHALQTGDFRTPAELALNKFEKESGHIRNQRGDYSHTFSRKDLQAELILLFEKQKEFGNPHVSGGLKEGIETLLMTQRPALS |
| for | | GDAVQKMLGHCTFEPAEPKAAKNTYTAERFIWLTKLNNLRILEQGSERPLTDTERATLMDEPYRKSKLTYAQARKLLGLEDTA |
| Nme2Cas9 | | FFKGLRYGKDNAEASTLMEMKAYHAISRALEKEGLKDKKSPLNLSSELQDEIGTAFSLEKTDEDITGRLKDRVQPEILEALLK |
| encoded | | HISFDKFVQISLKALRRIVPLMEQGKRYDEACAEIYGDHYGKKNTEEKIYLPPIPADEIRNPVVLRALSQARKVINGVVRRYG |
| by mRNA C | | SPARIHIETAREVGKSFKDRKEIEKRQEENRKDREKAAAKFREYFPNFVGEPKSKDILKLRLYEQQHGKCLYSGKEINLVRLN |
| | | EKGYVEIDHALPFSRTWDDSFNNKVLVLGSFNQNKGNQTPYEYENGKDNSREWQEFKARVETSREPRSKKQRILLQKFDEDGE |
| | | KECNLNDTRYVNRFLCQFVADHILLTGKGKRRVFASNGQITNLLRGFWGLRKVRAENDRHHALDAVVVACSTVAMQQKITRFV |
| | | RYKEMNAFDGKTIDKETGKVLHQKTHFPQPWEFFAQEVMIRVFGKPDGKPEFEEADTPEKLRTLLAEKLSSRPEAVHEYVTPL |
| | | FVSRAPNRKMSGAHKDTLRSAKRFVKHNEKISVKRVWLTEIKLADLENMVNYKNGREIELYEALKARLEAYGGNAKQAFDPKD |
| | | NPFYKKGGQLVKAVRVEKTQESGVLLNKKNAYTIADNGDMVRVDVFCKVDKKGKNQYFIVPIYAWQVAENILPDIDCKGYRID |
| | | DSYTFCFSLHKYDLIAFQKDEKSKVEFAYYINCDSSNGRFYLAWHDKGSKEQQFRISTQNLVLIQKYQVNELGKEIRPCRLKK |
| | | RPPVRSGKRTADGSEFESPKKKRKVE |
| Amino | 2 | MEASPASGPRHLMDPHIFTSNENNGIGRHKTYLCYEVERLDNGTSVKMDQHRGFLHNQAKNLLCGFYGRHAELRELDLVPSLQ |
| acid | | LDPAQIYRVTWFISWSPCFSWGCAGEVRAFLQENTHVRLRIFAARIYDYDPLYKEALQMLRDAGAQVSIMTYDEFKHCWDTEV |
| sequence | | DHQGCPFQPWDGLDEHSQALSGRLRAILQNQGNSGSETPGTSESATPESDKKYSIGLAIGTNSVGWAVITDEYKVPSKKFKVL |
| for | | GNTDRHSIKKNLIGALLFDSGETAEATRLKRTARRRYTRRKNRICYLQEIFSNEMAKVDDSFFHRLEESELVEEDKKHERHPI |
| SpyCas9 | | FGNIVDEVAYHEKYPTIYHLRKKLVDSTDKADLRLIYLALAHMIKERGHFLIEGDLNPDNSDVDKLFIQLVQTYNQLFEENPI |
| base | | NASGVDAKAILSARLSKSRRLENLIAQLPGEKKNGLFGNLIALSLGLTPNEKSNEDLAEDAKLQLSKDTYDDDLDNLLAQIGD |
| editor | | QYADLFLAAKNLSDAILLSDILRVNTEITKAPLSASMIKRYDEHHQDLTLLKALVRQQLPEKYKEIFFDQSKNGYAGYIDGGA |
| encoded | | SQEEFYKFIKPILEKMDGTEELLVKLNREDLLRKQRTEDNGSIPHQIHLGELHAILRRQEDFYPFLKDNREKIEKILTFRIPY |
| by mRNA E | | YVGPLARGNSRFAWMTRKSEETITPWNFEEVVDKGASAQSFIERMTNEDKNLPNEKVLPKHSLLYEYFTVYNELTKVKYVTEG |
| | | MRKPAFLSGEQKKAIVDLLFKTNRKVTVKQLKEDYFKKIECFDSVEISGVEDRENASLGTYHDLLKIIKDKDELDNEENEDIL |
| | | EDIVLTLTLFEDREMIEERLKTYAHLFDDKVMKQLKRRRYTGWGRLSRKLINGIRDKQSGKTILDELKSDGFANRNEMQLIHD |
| | | DSLTFKEDIQKAQVSGQGDSLHEHIANLAGSPAIKKGILQTVKVVDELVKVMGRHKPENIVIEMARENQTTQKGQKNSRERMK |
| | | RIEEGIKELGSQILKEHPVENTQLQNEKLYLYYLQNGRDMYVDQELDINRLSDYDVDHIVPQSFLKDDSIDNKVLTRSDKNRG |
| | | KSDNVPSEEVVKKMKNYWRQLLNAKLITQRKEDNLTKAERGGLSELDKAGFIKRQLVETRQITKHVAQILDSRMNTKYDENDK |
| | | LIREVKVITLKSKLVSDERKDFQFYKVREINNYHHAHDAYLNAVVGTALIKKYPKLESEFVYGDYKVYDVRKMIAKSEQEIGK |
| | | ATAKYFFYSNIMNFFKTEITLANGEIRKRPLIETNGETGEIVWDKGRDFATVRKVLSMPQVNIVKKTEVQTGGFSKESILPKR |
| | | NSDKLIARKKDWDPKKYGGFDSPTVAYSVLVVAKVEKGKSKKLKSVKELLGITIMERSSFEKNPIDFLEAKGYKEVKKDLIIK |
| | | LPKYSLFELENGRKRMLASAGELQKGNELALPSKYVNFLYLASHYEKLKGSPEDNEQKQLFVEQHKHYLDEIIEQISEFSKRV |
| | | ILADANLDKVLSAYNKHRDKPIREQAENIIHLFTLTNLGAPAAFKYEDTTIDRKRYTSTKEVLDATLIHQSITGLYETRIDLS |
| | | QLGGDGGGSPKKKRKV |
| Amino | 3 | MTNLSDIIEKETGKQLVIQESILMLPEEVEEVIGNKPESDILVHTAYDESTDENVMLLTSDAPEYKPWALVIQDSNGENKIKM |
| acid | | LSGGSKRTADGSEFESPKKKRKVE |
| sequence | | |
| for UGI | | |
| encoded | | |
| by mRNA G | | |
| Amino | 4 | MAAFKPNPINYILGLDIGIASVGWAMVEIDEEENPIRLIDLGVRVFERAEVPKTGDSLAMARRLARSVRRLTRRRAHRLLRAR |
| acid | | RLLKREGVLQAADFDENGLIKSLPNTPWQLRAAALDRKLTPLEWSAVLLHLIKHRGYLSQRKNEGETADKELGALLKGVANNA |
| sequence | | HALQTGDFRTPAELALNKFEKESGHIRNQRGDYSHTFSRKDLQAELILLFEKQKEFGNPHVSGGLKEGIETLLMTQRPALSGD |
| for | | AVQKMLGHCTFEPAEPKAAKNTYTAERFIWLTKLNNLRILEQGSERPLTDTERATLMDEPYRKSKLTYAQARKLLGLEDTAFF |
| Nme2Cas9 | | KGLRYGKDNAEASTLMEMKAYHAISRALEKEGLKDKKSPLNLSSELQDEIGTAFSLEKTDEDITGRLKDRVQPEILEALLKHI |
| encoded | | SFDKFVQISLKALRRIVPLMEQGKRYDEACAEIYGDHYGKKNTEEKIYLPPIPADEIRNPVVLRALSQARKVINGVVRRYGSP |
| by mRNA H | | ARIHIETAREVGKSFKDRKEIEKRQEENRKDREKAAAKFREYFPNFVGEPKSKDILKLRLYEQQHGKCLYSGKEINLVRLNEK |
| | | GYVEIDHALPFSRTWDDSFNNKVLVLGSFNQNKGNQTPYEYENGKDNSREWQEFKARVETSRFPRSKKQRILLQKFDEDGEKE |
| | | CNLNDTRYVNRFLCQFVADHILLTGKGKRRVFASNGQITNLLRGFWGLRKVRAENDRHHALDAVVVACSTVAMQQKITRFVRY |
| | | KEMNAFDGKTIDKETGKVLHQKTHFPQPWEFFAQEVMIRVFGKPDGKPEFEEADTPEKLRTLLAEKLSSRPEAVHEYVTPLFV |
| | | SRAPNRKMSGAHKDTLRSAKRFVKHNEKISVKRVWLTEIKLADLENMVNYKNGREIELYEALKARLEAYGGNAKQAFDPKDNP |
| | | FYKKGGQLVKAVRVEKTQESGVLLNKKNAYTIADNGDMVRVDVFCKVDKSGGGSPKKKRKVSGGSGKNQYFIVPIYAWQVAEN |
| | | ILPDIDCKGYRIDDSYTFCFSLHKYDLIAFQKDEKSKVEFAYYINCDSSNGRFYLAWHDKGSKEQQFRISTQNLVLIQKYQVN |
| | | ELGKEIRPCRLKKRPPVR |
| Amino | 5 | MVPKKKRKVAAFKPNPINYILGLDIGIASVGWAMVEIDEEENPIRLIDLGVRVFERAEVPKTGDSLAMARRLARSVRRLTRRR |
| acid | | AHRLLRARRLLKREGVLQAADFDENGLIKSLPNTPWQLRAAALDRKLTPLEWSAVLLHLIKHRGYLSQRKNEGETADKELGAL |
| sequence | | LKGVANNAHALQTGDFRTPAELALNKFEKESGHIRNQRGDYSHTFSRKDLQAELILLFEKQKEFGNPHVSGGLKEGIETLLMT |
| for | | QRPALSGDAVQKMLGHCTFEPAEPKAAKNTYTAERFIWLTKLNNLRILEQGSERPLTDTERATLMDEPYRKSKLTYAQARKLL |
| Nme2Cas9 | | GLEDTAFFKGLRYGKDNAEASTLMEMKAYHAISRALEKEGLKDKKSPLNLSSELQDEIGTAFSLFKTDEDITGRLKDRVQPEI |
| encoded | | LEALLKHISFDKFVQISLKALRRIVPLMEQGKRYDEACAEIYGDHYGKKNTEEKIYLPPIPADEIRNPVVLRALSQARKVING |
| by mRNA I | | VVRRYGSPARIHIETAREVGKSFKDRKEIEKRQEENRKDREKAAAKFREYFPNFVGEPKSKDILKLRLYEQQHGKCLYSGKEI |
| | | NLVRLNEKGYVEIDHALPESRTWDDSFNNKVLVLGSFNQNKGNQTPYEYENGKDNSREWQEFKARVETSRFPRSKKQRILLQK |
| | | FDEDGEKECNLNDTRYVNRFLCQFVADHILLTGKGKRRVFASNGQITNLLRGFWGLRKVRAENDRHHALDAVVVACSTVAMQQ |
| | | KITRFVRYKEMNAFDGKTIDKETGKVLHQKTHFPQPWEFFAQEVMIRVFGKPDGKPEFEEADTPEKLRTLLAEKLSSRPEAVH |
| | | EYVTPLFVSRAPNRKMSGAHKDTLRSAKRFVKHNEKISVKRVWLTEIKLADLENMVNYKNGREIELYEALKARLEAYGGNAKQ |
| | | AFDPKDNPFYKKGGQLVKAVRVEKTQESGVLLNKKNAYTIADNGDMVRVDVFCKVDKKGKNQYFIVPIYAWQVAENILPDIDC |
| | | KGYRIDDSYTFCFSLHKYDLIAFQKDEKSKVEFAYYINCDSSNGRFYLAWHDKGSKEQQFRISTQNLVLIQKYQVNELGKEIR |
| | | PCRLKKRPPVRYPYDVPDYAAAPAAKKKKLD |
| Amino | 6 | MAAFKPNPINYILGLDIGIASVGWAMVEIDEEENPIRLIDLGVRVFERAEVPKTGDSLAMARRLARSVRRLTRRRAHRLLRAR |
| acid | | RLLKREGVLQAADEDENGLIKSLPNTPWQLRAAALDRKLTPLEWSAVLLHLIKHRGYLSQRKNEGETADKELGALLKGVANNA |
| sequence | | HALQTGDFRTPAELALNKFEKESGHIRNQRGDYSHTFSRKDLQAELILLFEKQKEFGNPHVSGGLKEGIETLLMTQRPALSGD |
| for | | AVQKMLGHCTFEPAEPKAAKNTYTAERFIWLTKLNNLRILEQGSERPLTDTERATLMDEPYRKSKLTYAQARKLLGLEDTAFF |
| Nme2Cas9 | | KGLRYGKDNAEASTLMEMKAYHAISRALEKEGLKDKKSPLNLSSELQDEIGTAFSLEKTDEDITGRLKDRVQPEILEALLKHI |
| encoded | | SFDKFVQISLKALRRIVPLMEQGKRYDEACAEIYGDHYGKKNTEEKIYLPPIPADEIRNPVVLRALSQARKVINGVVRRYGSP |
| by mRNA J | | ARIHIETAREVGKSFKDRKEIEKRQEENRKDREKAAAKFREYFPNFVGEPKSKDILKLRLYEQQHGKCLYSGKEINLVRLNEK |
| | | GYVEIDHALPFSRTWDDSFNNKVLVLGSENQNKGNQTPYEYENGKDNSREWQEFKARVETSRFPRSKKQRILLQKEDEDGEKE |
| | | CNLNDTRYVNRFLCQFVADHILLTGKGKRRVFASNGQITNLLRGFWGLRKVRAENDRHHALDAVVVACSTVAMQQKITRFVRY |
| | | KEMNAFDGKTIDKETGKVLHQKTHEPQPWEFFAQEVMIRVFGKPDGKPEFEEADTPEKLRTLLAEKLSSRPEAVHEYVTPLFV |
| | | SRAPNRKMSGAHKDTLRSAKRFVKHNEKISVKRVWLTEIKLADLENMVNYKNGREIELYEALKARLEAYGGNAKQAFDPKDNP |
| | | FYKKGGQLVKAVRVEKTQESGVLLNKKNAYTIADNGDMVRVDVFCKVDKKGKNQYFIVPIYAWQVAENILPDIDCKGYRIDDS |
| | | YTFCFSLHKYDLIAFQKDEKSKVEFAYYINCDSSNGRFYLAWHDKGSKEQQFRISTQNLVLIQKYQVNELGKEIRPCRLKKRP |
| | | PVR |
| Amino | 7 | MAAFKPNPINYILGLDIGIASVGWAMVEIDEEENPIRLIDLGVRVFERAEVPKTGDSLAMARRLARSVRRLTRRRAHRLLRAR |
| acid | | RLLKREGVLQAADFDENGLIKSLPNTPWQLRAAALDRKLTPLEWSAVLLHLIKHRGYLSQRKNEGETADKELGALLKGVANNA |
| sequence | | HALQTGDFRTPAELALNKFEKESGHIRNQRGDYSHTFSRKDLQAELILLFEKQKEFGNPHVSGGLKEGIETLLMTQRPALSGD |
| for | | AVQKMLGHCTFEPAEPKAAKNTYTAERFIWLTKLNNLRILEQGSERPLTDTERATLMDEPYRKSKLTYAQARKLLGLEDTAFF |
| Nme2Cas9 | | KGLRYGKDNAEASTLMEMKAYHAISRALEKEGLKDKKSPLNLSSELQDEIGTAFSLEKTDEDITGRLKDRVQPEILEALLKHI |
| encoded | | SFDKFVQISLKALRRIVPLMEQGKRYDEACAEIYGDHYGKKNTEEKIYLPPIPADEIRNPVVLRALSQARKVINGVVRRYGSP |
| by mRNA K | | ARIHIETAREVGKSFKDRKEIEKRQEENRKDREKAAAKFREYFPNFVGEPKSKDILKLRLYEQQHGKCLYSGKEINLVRLNEK |
| | | GYVEIDHALPFSRTWDDSFNNKVLVLGSENQNKGNQTPYEYENGKDNSREWQEFKARVETSRFPRSKKQRILLQKFDEDGEKE |
| | | CNLNDTRYVNRFLCQFVADHILLTGKGKRRVFASNGQITNLLRGFWGLRKVRAENDRHHALDAVVVACSTVAMQQKITRFVRY |
| | | KEMNAFDGKTIDKETGKVLHQKTHFPQPWEFFAQEVMIRVFGKPDGKPEFEEADTPEKLRTLLAEKLSSRPEAVHEYVTPLFV |
| | | SRAPNRKMSGAHKDTLRSAKRFVKHNEKISVKRVWLTEIKLADLENMVNYKNGREIELYEALKARLEAYGGNAKQAFDPKDNP |
| | | FYKKGGQLVKAVRVEKTQESGVLLNKKNAYTIADNGDMVRVDVFCKVDKKGKNQYFIVPIYAWQVAENILPDIDCKGYRIDDS |
| | | YTFCFSLHKYDLIAFQKDEKSKVEFAYYINCDSSNGRFYLAWHDKGSKEQQFRISTQNLVLIQKYQVNELGKEIRPCRLKKRP |
| | | PVR |
| Amino | 8 | MDGSGGGSPKKKRKVGGSGGGAAFKPNPINYILGLDIGIASVGWAMVEIDEEENPIRLIDLGVRVFERAEVPKTGDSLAMARR |
| acid | | LARSVRRLTRRRAHRLLRARRLLKREGVLQAADFDENGLIKSLPNTPWQLRAAALDRKLTPLEWSAVLLHLIKHRGYLSQRKN |
| sequence | | EGETADKELGALLKGVANNAHALQTGDFRTPAELALNKFEKESGHIRNQRGDYSHTFSRKDLQAELILLFEKQKEFGNPHVSG |
| for | | GLKEGIETLLMTQRPALSGDAVQKMLGHCTFEPAEPKAAKNTYTAERFIWLTKLNNLRILEQGSERPLTDTERATLMDEPYRK |
| Nme2Cas9 | | SKLTYAQARKLLGLEDTAFFKGLRYGKDNAEASTLMEMKAYHAISRALEKEGLKDKKSPLNLSSELQDEIGTAFSLEKTDEDI |
| encoded | | TGRLKDRVQPEILEALLKHISFDKFVQISLKALRRIVPLMEQGKRYDEACAEIYGDHYGKKNTEEKIYLPPIPADEIRNPVVL |
| by mRNA L | | RALSQARKVINGVVRRYGSPARIHIETAREVGKSFKDRKEIEKRQEENRKDREKAAAKFREYFPNFVGEPKSKDILKLRLYEQ |
| | | QHGKCLYSGKEINLVRLNEKGYVEIDHALPFSRTWDDSFNNKVLVLGSENQNKGNQTPYEYENGKDNSREWQEFKARVETSRE |
| | | PRSKKQRILLQKFDEDGFKECNLNDTRYVNRFLCQFVADHILLTGKGKRRVFASNGQITNLLRGFWGLRKVRAENDRHHALDA |
| | | VVVACSTVAMQQKITRFVRYKEMNAFDGKTIDKETGKVLHQKTHFPQPWEFFAQEVMIRVEGKPDGKPEFEEADTPEKLRTLL |
| | | AEKLSSRPEAVHEYVTPLFVSRAPNRKMSGAHKDTLRSAKRFVKHNEKISVKRVWLTEIKLADLENMVNYKNGREIELYEALK |
| | | ARLEAYGGNAKQAFDPKDNPFYKKGGQLVKAVRVEKTQESGVLLNKKNAYTIADNGDMVRVDVFCKVDKKGKNQYFIVPIYAW |
| | | QVAENILPDIDCKGYRIDDSYTFCFSLHKYDLIAFQKDEKSKVEFAYYINCDSSNGRFYLAWHDKGSKEQQFRISTQNLVLIQ |
| | | KYQVNELGKEIRPCRLKKRPPVR |
| Amino | 9 | MDGSGGGSPKKKRKVGGSGGGAAFKPNPINYILGLDIGIASVGWAMVEIDEEENPIRLIDLGVRVFERAEVPKTGDSLAMARR |
| acid | | LARSVRRLTRRRAHRLLRARRLLKREGVLQAADEDENGLIKSLPNTPWQLRAAALDRKLTPLEWSAVLLHLIKHRGYLSQRKN |
| sequence | | EGETADKELGALLKGVANNAHALQTGDERTPAELALNKFEKESGHIRNQRGDYSHTFSRKDLQAELILLFEKQKEFGNPHVSG |
| for | | GLKEGIETLLMTQRPALSGDAVQKMLGHCTFEPAEPKAAKNTYTAERFIWLTKLNNLRILEQGSERPLTDTERATLMDEPYRK |
| Nme2Cas9 | | SKLTYAQARKLLGLEDTAFFKGLRYGKDNAEASTLMEMKAYHAISRALEKEGLKDKKSPLNLSSELQDEIGTAFSLEKTDEDI |
| with | | TGRLKDRVQPEILEALLKHISFDKFVQISLKALRRIVPLMEQGKRYDEACAEIYGDHYGKKNTEEKIYLPPIPADEIRNPVVL |
| HiBiT tag | | RALSQARKVINGVVRRYGSPARIHIETAREVGKSFKDRKEIEKRQEENRKDREKAAAKFREYEPNFVGEPKSKDILKLRLYEQ |
| encoded | | QHGKCLYSGKEINLVRLNEKGYVEIDHALPFSRTWDDSFNNKVLVLGSENQNKGNQTPYEYENGKDNSREWQEFKARVETSRF |
| by mRNA M | | PRSKKQRILLQKFDEDGFKECNLNDTRYVNRFLCQFVADHILLTGKGKRRVFASNGQITNLLRGEWGLRKVRAENDRHHALDA |
| | | VVVACSTVAMQQKITRFVRYKEMNAFDGKTIDKETGKVLHQKTHFPQPWEFFAQEVMIRVFGKPDGKPEFEEADTPEKLRTLL |
| | | AEKLSSRPEAVHEYVTPLFVSRAPNRKMSGAHKDTLRSAKRFVKHNEKISVKRVWLTEIKLADLENMVNYKNGREIELYEALK |
| | | ARLEAYGGNAKQAFDPKDNPFYKKGGQLVKAVRVEKTQESGVLLNKKNAYTIADNGDMVRVDVFCKVDKKGKNQYFIVPIYAW |
| | | QVAENILPDIDCKGYRIDDSYTFCFSLHKYDLIAFQKDEKSKVEFAYYINCDSSNGRFYLAWHDKGSKEQQFRISTQNLVLIQ |
| | | KYQVNELGKEIRPCRLKKRPPVRSESATPESVSGWRLEKKIS |
| Amino | 10 | MDGSGGGSPKKKRKVGGSGGGAAFKPNPINYILGLDIGIASVGWAMVEIDEEENPIRLIDLGVRVFERAEVPKTGDSLAMARR |
| acid | | LARSVRRLTRRRAHRLLRARRLLKREGVLQAADFDENGLIKSLPNTPWQLRAAALDRKLTPLEWSAVLLHLIKHRGYLSQRKN |
| sequence | | EGETADKELGALLKGVANNAHALQTGDFRTPAELALNKFEKESGHIRNQRGDYSHTFSRKDLQAELILLFEKQKEFGNPHVSG |
| for | | GLKEGIETLLMTQRPALSGDAVQKMLGHCTFEPAEPKAAKNTYTAERFIWLTKLNNLRILEQGSERPLTDTERATLMDEPYRK |
| Nme2Cas9 | | SKLTYAQARKLLGLEDTAFFKGLRYGKDNAEASTLMEMKAYHAISRALEKEGLKDKKSPLNLSSELQDEIGTAFSLEKTDEDI |
| encoded | | TGRLKDRVQPEILEALLKHISFDKFVQISLKALRRIVPLMEQGKRYDEACAEIYGDHYGKKNTEEKIYLPPIPADEIRNPVVL |
| by mRNA N | | RALSQARKVINGVVRRYGSPARIHIETAREVGKSFKDRKEIEKRQEENRKDREKAAAKFREYFPNFVGEPKSKDILKLRLYEQ |
| | | QHGKCLYSGKEINLVRLNEKGYVEIDHALPFSRTWDDSFNNKVLVLGSENQNKGNQTPYEYENGKDNSREWQEFKARVETSRE |
| | | PRSKKQRILLQKFDEDGEKECNLNDTRYVNRFLCQFVADHILLTGKGKRRVFASNGQITNLLRGFWGLRKVRAENDRHHALDA |
| | | VVVACSTVAMQQKITRFVRYKEMNAFDGKTIDKETGKVLHQKTHFPQPWEFFAQEVMIRVFGKPDGKPEFEEADTPEKLRTLL |
| | | AEKLSSRPEAVHEYVTPLFVSRAPNRKMSGAHKDTLRSAKRFVKHNEKISVKRVWLTEIKLADLENMVNYKNGREIELYEALK |
| | | ARLEAYGGNAKQAFDPKDNPFYKKGGQLVKAVRVEKTQESGVLLNKKNAYTIADNGDMVRVDVFCKVDKKGKNQYFIVPIYAW |
| | | QVAENILPDIDCKGYRIDDSYTFCFSLHKYDLIAFQKDEKSKVEFAYYINCDSSNGRFYLAWHDKGSKEQQFRISTQNLVLIQ |
| | | KYQVNELGKEIRPCRLKKRPPVRSGKRTADGSGGGSPAAKKKKLD |
| Amino | 11 | MDGSGGGSPKKKRKVEDKRPAATKKAGQAKKKKGGSGGGAAFKPNPINYILGLDIGIASVGWAMVEIDEEENPIRLIDLGVRV |
| acid | | FERAEVPKTGDSLAMARRLARSVRRLTRRRAHRLLRARRLLKREGVLQAADEDENGLIKSLPNTPWQLRAAALDRKLTPLEWS |
| sequence | | AVLLHLIKHRGYLSQRKNEGETADKELGALLKGVANNAHALQTGDFRTPAELALNKFEKESGHIRNQRGDYSHTFSRKDLQAE |
| for | | LILLFEKQKEFGNPHVSGGLKEGIETLLMTQRPALSGDAVQKMLGHCTFEPAEPKAAKNTYTAERFIWLTKLNNLRILEQGSE |
| Nme2Cas9 | | RPLTDTERATLMDEPYRKSKLTYAQARKLLGLEDTAFFKGLRYGKDNAEASTLMEMKAYHAISRALEKEGLKDKKSPLNLSSE |
| encoded | | LQDEIGTAFSLEKTDEDITGRLKDRVQPEILEALLKHISFDKFVQISLKALRRIVPLMEQGKRYDEACAEIYGDHYGKKNTEE |
| by mRNA O | | KIYLPPIPADEIRNPVVLRALSQARKVINGVVRRYGSPARIHIETAREVGKSFKDRKEIEKRQEENRKDREKAAAKFREYFPN |
| | | FVGEPKSKDILKLRLYEQQHGKCLYSGKEINLVRLNEKGYVEIDHALPFSRTWDDSFNNKVLVLGSENQNKGNQTPYEYENGK |
| | | DNSREWQEFKARVETSRFPRSKKQRILLQKFDEDGFKECNLNDTRYVNRFLCQFVADHILLTGKGKRRVFASNGQITNLLRGF |
| | | WGLRKVRAENDRHHALDAVVVACSTVAMQQKITRFVRYKEMNAFDGKTIDKETGKVLHQKTHFPQPWEFFAQEVMIRVFGKPD |
| | | GKPEFEEADTPEKLRTLLAEKLSSRPEAVHEYVTPLFVSRAPNRKMSGAHKDTLRSAKRFVKHNEKISVKRVWLTEIKLADLE |
| | | NMVNYKNGREIELYEALKARLEAYGGNAKQAFDPKDNPFYKKGGQLVKAVRVEKTQESGVLLNKKNAYTIADNGDMVRVDVEC |
| | | KVDKKGKNQYFIVPIYAWQVAENILPDIDCKGYRIDDSYTFCFSLHKYDLIAFQKDEKSKVEFAYYINCDSSNGRFYLAWHDK |
| | | GSKEQQFRISTQNLVLIQKYQVNELGKEIRPCRLKKRPPVR |
| Amino | 12 | MDGSGGGSPKKKRKVEDKRPAATKKAGQAKKKKGGSGGGAAFKPNPINYILGLDIGIASVGWAMVEIDEEENPIRLIDLGVRV |
| acid | | FERAEVPKTGDSLAMARRLARSVRRLTRRRAHRLLRARRLLKREGVLQAADFDENGLIKSLPNTPWQLRAAALDRKLTPLEWS |
| sequence | | AVLLHLIKHRGYLSQRKNEGETADKELGALLKGVANNAHALQTGDFRTPAELALNKFEKESGHIRNQRGDYSHTFSRKDLQAE |
| for | | LILLFEKQKEFGNPHVSGGLKEGIETLLMTQRPALSGDAVQKMLGHCTFEPAEPKAAKNTYTAERFIWLTKLNNLRILEQGSE |
| Nme2Cas9 | | RPLTDTERATLMDEPYRKSKLTYAQARKLLGLEDTAFFKGLRYGKDNAEASTLMEMKAYHAISRALEKEGLKDKKSPLNLSSE |
| with | | LQDEIGTAFSLEKTDEDITGRLKDRVQPEILEALLKHISFDKFVQISLKALRRIVPLMEQGKRYDEACAEIYGDHYGKKNTEE |
| HiBiT tag | | KIYLPPIPADEIRNPVVLRALSQARKVINGVVRRYGSPARIHIETAREVGKSFKDRKEIEKRQEENRKDREKAAAKFREYFPN |
| encoded | | FVGEPKSKDILKLRLYEQQHGKCLYSGKEINLVRLNEKGYVEIDHALPFSRTWDDSFNNKVLVLGSENQNKGNQTPYEYENGK |
| by mRNA P | | DNSREWQEFKARVETSRFPRSKKQRILLQKFDEDGFKECNLNDTRYVNRFLCQFVADHILLTGKGKRRVFASNGQITNLLRGF |
| | | WGLRKVRAENDRHHALDAVVVACSTVAMQQKITRFVRYKEMNAFDGKTIDKETGKVLHQKTHFPQPWEFFAQEVMIRVFGKPD |
| | | GKPEFEEADTPEKLRTLLAEKLSSRPEAVHEYVTPLFVSRAPNRKMSGAHKDTLRSAKRFVKHNEKISVKRVWLTEIKLADLE |
| | | NMVNYKNGREIELYEALKARLEAYGGNAKQAFDPKDNPFYKKGGQLVKAVRVEKTQESGVLLNKKNAYTIADNGDMVRVDVFC |
| | | KVDKKGKNQYFIVPIYAWQVAENILPDIDCKGYRIDDSYTFCFSLHKYDLIAFQKDEKSKVEFAYYINCDSSNGRFYLAWHDK |
| | | GSKEQQFRISTQNLVLIQKYQVNELGKEIRPCRLKKRPPVRSESATPESVSGWRLFKKIS |
| Amino | 13 | MDGSGGGSEDKRPAATKKAGQAKKKKGGSGGGAAFKPNPINYILGLDIGIASVGWAMVEIDEEENPIRLIDLGVRVFERAEVP |
| acid | | KTGDSLAMARRLARSVRRLTRRRAHRLLRARRLLKREGVLQAADFDENGLIKSLPNTPWQLRAAALDRKLTPLEWSAVLLHLI |
| sequence | | KHRGYLSQRKNEGETADKELGALLKGVANNAHALQTGDERTPAELALNKFEKESGHIRNQRGDYSHTFSRKDLQAELILLFEK |
| for | | QKEFGNPHVSGGLKEGIETLLMTQRPALSGDAVQKMLGHCTFEPAEPKAAKNTYTAERFIWLTKLNNLRILEQGSERPLTDTE |
| Nme2Cas9 | | RATLMDEPYRKSKLTYAQARKLLGLEDTAFFKGLRYGKDNAEASTLMEMKAYHAISRALEKEGLKDKKSPLNLSSELQDEIGT |
| encoded | | AFSLFKTDEDITGRLKDRVQPEILEALLKHISFDKFVQISLKALRRIVPLMEQGKRYDEACAEIYGDHYGKKNTEEKIYLPPI |
| by mRNA Q | | PADEIRNPVVLRALSQARKVINGVVRRYGSPARIHIETAREVGKSFKDRKEIEKRQEENRKDREKAAAKFREYFPNFVGEPKS |
| | | KDILKLRLYEQQHGKCLYSGKEINLVRLNEKGYVEIDHALPFSRTWDDSFNNKVLVLGSENQNKGNQTPYEYENGKDNSREWQ |
| | | EFKARVETSRFPRSKKQRILLQKFDEDGEKECNLNDTRYVNRFLCQFVADHILLTGKGKRRVFASNGQITNLLRGFWGLRKVR |
| | | AENDRHHALDAVVVACSTVAMQQKITRFVRYKEMNAFDGKTIDKETGKVLHQKTHFPQPWEFFAQEVMIRVFGKPDGKPEFEE |
| | | ADTPEKLRTLLAEKLSSRPEAVHEYVTPLFVSRAPNRKMSGAHKDTLRSAKRFVKHNEKISVKRVWLTEIKLADLENMVNYKN |
| | | GREIELYEALKARLEAYGGNAKQAFDPKDNPFYKKGGQLVKAVRVEKTQESGVLLNKKNAYTIADNGDMVRVDVFCKVDKKGK |
| | | NQYFIVPIYAWQVAENILPDIDCKGYRIDDSYTFCFSLHKYDLIAFQKDEKSKVEFAYYINCDSSNGRFYLAWHDKGSKEQQF |
| | | RISTQNLVLIQKYQVNELGKEIRPCRLKKRPPVR |
| Amino | 14 | MDGSGGGSPKKKRKVEDKRPAATKKAGQAKKKKGGSGGGEASPASGPRHLMDPHIFTSNENNGIGRHKTYLCYEVERLDNGTS |
| acid | | VKMDQHRGFLHNQAKNLLCGFYGRHAELRFLDLVPSLQLDPAQIYRVTWFISWSPCFSWGCAGEVRAFLQENTHVRLRIFAAR |
| sequence | | IYDYDPLYKEALQMLRDAGAQVSIMTYDEFKHCWDTFVDHQGCPFQPWDGLDEHSQALSGRLRAILQNQGNSGSETPGTSESA |
| for | | TPESAAFKPNPINYILGLAIGIASVGWAMVEIDEEENPIRLIDLGVRVFERAEVPKTGDSLAMARRLARSVRRLTRRRAHRLL |
| Nme2Cas9 | | RARRLLKREGVLQAADFDENGLIKSLPNTPWQLRAAALDRKLTPLEWSAVLLHLIKHRGYLSQRKNEGETADKELGALLKGVA |
| base | | NNAHALQTGDFRTPAELALNKFEKESGHIRNQRGDYSHTFSRKDLQAELILLFEKQKEFGNPHVSGGLKEGIETLLMTQRPAL |
| editor | | SGDAVQKMLGHCTFEPAEPKAAKNTYTAERFIWLTKLNNLRILEQGSERPLTDTERATLMDEPYRKSKLTYAQARKLLGLEDT |
| encoded | | AFFKGLRYGKDNAEASTLMEMKAYHAISRALEKEGLKDKKSPLNLSSELQDEIGTAFSLEKTDEDITGRLKDRVQPEILEALL |
| by mRNA R | | KHISFDKFVQISLKALRRIVPLMEQGKRYDEACAEIYGDHYGKKNTEEKIYLPPIPADEIRNPVVLRALSQARKVINGVVRRY |
| | | GSPARIHIETAREVGKSFKDRKEIEKRQEENRKDREKAAAKFREYFPNFVGEPKSKDILKLRLYEQQHGKCLYSGKEINLVRL |
| | | NEKGYVEIDHALPFSRTWDDSFNNKVLVLGSENQNKGNQTPYEYENGKDNSREWQEFKARVETSRFPRSKKQRILLQKFDEDG |
| | | FKECNLNDTRYVNRFLCQFVADHILLTGKGKRRVFASNGQITNLLRGFWGLRKVRAENDRHHALDAVVVACSTVAMQQKITRF |
| | | VRYKEMNAFDGKTIDKETGKVLHQKTHFPQPWEFFAQEVMIRVFGKPDGKPEFEEADTPEKLRTLLAEKLSSRPEAVHEYVTP |
| | | LFVSRAPNRKMSGAHKDTLRSAKRFVKHNEKISVKRVWLTEIKLADLENMVNYKNGREIELYEALKARLEAYGGNAKQAFDPK |
| | | DNPFYKKGGQLVKAVRVEKTQESGVLLNKKNAYTIADNGDMVRVDVFCKVDKKGKNQYFIVPIYAWQVAENILPDIDCKGYRI |
| | | DDSYTFCFSLHKYDLIAFQKDEKSKVEFAYYINCDSSNGRFYLAWHDKGSKEQQFRISTQNLVLIQKYQVNELGKEIRPCRLK |
| | | KRPPVR |
| mRNA C | 15 | GGGAAGCUCAGAAUAAACGCUCAACUUUGGCCGGAUCUGCCACCAUGACCGGUGCCGCCUUCAAGCCCAACCCCAUCAACUAC |
| encoding | | AUCCUGGGCCUGGACAUCGGCAUCGCCUCCGUGGGCUGGGCCAUGGUGGAGAUCGACGAGGAGGAGAACCCCAUCCGGCUGAU |
| Nme2Cas9 | | CGACCUGGGCGUGCGGGUGUUCGAGCGGGCCGAGGUGCCCAAGACCGGCGACUCCCUGGCCAUGGCCCGGCGGCUGGCCCGGU |
| | | CCGUGCGGCGGCUGACCCGGCGGCGGGCCCACCGGCUGCUGCGGGCCCGGCGGCUGCUGAAGCGGGAGGGCGUGCUGCAGGCC |
| | | GCCGACUUCGACGAGAACGGCCUGAUCAAGUCCCUGCCCAACACCCCCUGGCAGCUGCGGGCCGCCGCCCUGGACCGGAAGCU |
| | | GACCCCCCUGGAGUGGUCCGCCGUGCUGCUGCACCUGAUCAAGCACCGGGGCUACCUGUCCCAGCGGAAGAACGAGGGCGAGA |
| | | CCGCCGACAAGGAGCUGGGCGCCCUGCUGAAGGGCGUGGCCAACAACGCCCACGCCCUGCAGACCGGCGACUUCCGGACCCCC |
| | | GCCGAGCUGGCCCUGAACAAGUUCGAGAAGGAGUCCGGCCACAUCCGGAACCAGCGGGGCGACUACUCCCACACCUUCUCCCG |
| | | GAAGGACCUGCAGGCCGAGCUGAUCCUGCUGUUCGAGAAGCAGAAGGAGUUCGGCAACCCCCACGUGUCCGGCGGCCUGAAGG |
| | | AGGGCAUCGAGACCCUGCUGAUGACCCAGCGGCCCGCCCUGUCCGGCGACGCCGUGCAGAAGAUGCUGGGCCACUGCACCUUC |
| | | GAGCCCGCCGAGCCCAAGGCCGCCAAGAACACCUACACCGCCGAGCGGUUCAUCUGGCUGACCAAGCUGAACAACCUGCGGAU |
| | | CCUGGAGCAGGGCUCCGAGCGGCCCCUGACCGACACCGAGCGGGCCACCCUGAUGGACGAGCCCUACCGGAAGUCCAAGCUGA |
| | | CCUACGCCCAGGCCCGGAAGCUGCUGGGCCUGGAGGACACCGCCUUCUUCAAGGGCCUGCGGUACGGCAAGGACAACGCCGAG |
| | | GCCUCCACCCUGAUGGAGAUGAAGGCCUACCACGCCAUCUCCCGGGCCCUGGAGAAGGAGGGCCUGAAGGACAAGAAGUCCCC |
| | | CCUGAACCUGUCCUCCGAGCUGCAGGACGAGAUCGGCACCGCCUUCUCCCUGUUCAAGACCGACGAGGACAUCACCGGCCGGC |
| | | UGAAGGACCGGGUGCAGCCCGAGAUCCUGGAGGCCCUGCUGAAGCACAUCUCCUUCGACAAGUUCGUGCAGAUCUCCCUGAAG |
| | | GCCCUGCGGCGGAUCGUGCCCCUGAUGGAGCAGGGCAAGCGGUACGACGAGGCCUGCGCCGAGAUCUACGGCGACCACUACGG |
| | | CAAGAAGAACACCGAGGAGAAGAUCUACCUGCCCCCCAUCCCCGCCGACGAGAUCCGGAACCCCGUGGUGCUGCGGGCCCUGU |
| | | CCCAGGCCCGGAAGGUGAUCAACGGCGUGGUGCGGCGGUACGGCUCCCCCGCCCGGAUCCACAUCGAGACCGCCCGGGAGGUG |
| | | GGCAAGUCCUUCAAGGACCGGAAGGAGAUCGAGAAGCGGCAGGAGGAGAACCGGAAGGACCGGGAGAAGGCCGCCGCCAAGUU |
| | | CCGGGAGUACUUCCCCAACUUCGUGGGCGAGCCCAAGUCCAAGGACAUCCUGAAGCUGCGGCUGUACGAGCAGCAGCACGGCA |
| | | AGUGCCUGUACUCCGGCAAGGAGAUCAACCUGGUGCGGCUGAACGAGAAGGGCUACGUGGAGAUCGACCACGCCCUGCCCUUC |
| | | UCCCGGACCUGGGACGACUCCUUCAACAACAAGGUGCUGGUGCUGGGCUCCGAGAACCAGAACAAGGGCAACCAGACCCCCUA |
| | | CGAGUACUUCAACGGCAAGGACAACUCCCGGGAGUGGCAGGAGUUCAAGGCCCGGGUGGAGACCUCCCGGUUCCCCCGGUCCA |
| | | AGAAGCAGCGGAUCCUGCUGCAGAAGUUCGACGAGGACGGCUUCAAGGAGUGCAACCUGAACGACACCCGGUACGUGAACCGC |
| | | UUCCUGUGCCAGUUCGUGGCCGACCACAUCCUGCUGACCGGCAAGGGCAAGCGGCGGGUGUUCGCCUCCAACGGCCAGAUCAC |
| | | CAACCUGCUGCGGGGCUUCUGGGGCCUGCGGAAGGUGCGGGCCGAGAACGACCGGCACCACGCCCUGGACGCCGUGGUGGUGG |
| | | CCUGCUCCACCGUGGCCAUGCAGCAGAAGAUCACCCGGUUCGUGCGGUACAAGGAGAUGAACGCCUUCGACGGCAAGACCAUC |
| | | GACAAGGAGACCGGCAAGGUGCUGCACCAGAAGACCCACUUCCCCCAGCCCUGGGAGUUCUUCGCCCAGGAGGUGAUGAUCCG |
| | | GGUGUUCGGCAAGCCCGACGGCAAGCCCGAGUUCGAGGAGGCCGACACCCCCGAGAAGCUGCGGACCCUGCUGGCCGAGAAGC |
| | | UGUCCUCCCGGCCCGAGGCCGUGCACGAGUACGUGACCCCCCUGUUCGUGUCCCGGGCCCCCAACCGGAAGAUGUCCGGCGCC |
| | | CACAAGGACACCCUGCGGUCCGCCAAGCGGUUCGUGAAGCACAACGAGAAGAUCUCCGUGAAGCGGGUGUGGCUGACCGAGAU |
| | | CAAGCUGGCCGACCUGGAGAACAUGGUGAACUACAAGAACGGCCGGGAGAUCGAGCUGUACGAGGCCCUGAAGGCCCGGCUGG |
| | | AGGCCUACGGCGGCAACGCCAAGCAGGCCUUCGACCCCAAGGACAACCCCUUCUACAAGAAGGGCGGCCAGCUGGUGAAGGCC |
| | | GUGCGGGUGGAGAAGACCCAGGAGUCCGGCGUGCUGCUGAACAAGAAGAACGCCUACACCAUCGCCGACAACGGCGACAUGGU |
| | | GCGGGUGGACGUGUUCUGCAAGGUGGACAAGAAGGGCAAGAACCAGUACUUCAUCGUGCCCAUCUACGCCUGGCAGGUGGCCG |
| | | AGAACAUCCUGCCCGACAUCGACUGCAAGGGCUACCGGAUCGACGACUCCUACACCUUCUGCUUCUCCCUGCACAAGUACGAC |
| | | CUGAUCGCCUUCCAGAAGGACGAGAAGUCCAAGGUGGAGUUCGCCUACUACAUCAACUGCGACUCCUCCAACGGCCGGUUCUA |
| | | CCUGGCCUGGCACGACAAGGGCUCCAAGGAGCAGCAGUUCCGGAUCUCCACCCAGAACCUGGUGCUGAUCCAGAAGUACCAGG |
| | | UGAACGAGCUGGGCAAGGAGAUCCGGCCCUGCCGGCUGAAGAAGCGGCCCCCCGUGCGGUCCGGAAAGCGGACCGCCGACGGC |
| | | UCCGAGUUCGAGUCCCCCAAGAAGAAGCGGAAGGUGGAGUAGCUAGCACCAGCCUCAAGAACACCCGAAUGGAGUCUCUAAGC |
| | | UACAUAAUACCAACUUACACUUUACAAAAUGUUGUCCCCCAAAAUGUAGCCAUUCGUAUCUGCUCCUAAUAAAAAGAAAGUUU |
| | | CUUCACAUUCUCUCGAGAAAAAAAAAAAAUGGAAAAAAAAAAAACGGAAAAAAAAAAAAGGUAAAAAAAAAAAAUAUAAAAAA |
| | | AAAAAACAUAAAAAAAAAAAACGAAAAAAAAAAAACGUAAAAAAAAAAAACUCAAAAAAAAAAAAGAUAAAAAAAAAAAACCU |
| | | AAAAAAAAAAAAUGUAAAAAAAAAAAAGGGAAAAAAAAAAAACGCAAAAAAAAAAAACACAAAAAAAAAAAAUGCAAAAAAAA |
| | | AAAAUCGAAAAAAAAAAAAUCUAAAAAAAAAAAACGAAAAAAAAAAAACCCAAAAAAAAAAAAGACAAAAAAAAAAAAUAGAA |
| | | AAAAAAAAAAGUUAAAAAA |
| mRNA E | 16 | GGGAAGCUCAGAAUAAACGCUCAACUUUGGCCGGAUCUGCCACCAUGGAGGCCUCCCCCGCCUCCGGCCCCCGGCACCUGAUG |
| encoding | | GACCCCCACAUCUUCACCUCCAACUUCAACAACGGCAUCGGCCGGCACAAGACCUACCUGUGCUACGAGGUGGAGCGGCUGGA |
| SpyCas9 | | CAACGGCACCUCCGUGAAGAUGGACCAGCACCGGGGCUUCCUGCACAACCAGGCCAAGAACCUGCUGUGCGGCUUCUACGGCC |
| base | | GGCACGCCGAGCUGCGGUUCCUGGACCUGGUGCCCUCCCUGCAGCUGGACCCCGCCCAGAUCUACCGGGUGACCUGGUUCAUC |
| editor | | UCCUGGUCCCCCUGCUUCUCCUGGGGCUGCGCCGGCGAGGUGCGGGCCUUCCUGCAGGAGAACACCCACGUGCGGCUGCGGAU |
| | | CUUCGCCGCCCGGAUCUACGACUACGACCCCCUGUACAAGGAGGCCCUGCAGAUGCUGCGGGACGCCGGCGCCCAGGUGUCCA |
| | | UCAUGACCUACGACGAGUUCAAGCACUGCUGGGACACCUUCGUGGACCACCAGGGCUGCCCCUUCCAGCCCUGGGACGGCCUG |
| | | GACGAGCACUCCCAGGCCCUGUCCGGCCGGCUGCGGGCCAUCCUGCAGAACCAGGGCAACUCCGGCUCCGAGACCCCCGGCAC |
| | | CUCCGAGUCCGCCACCCCCGAGUCCGACAAGAAGUACUCCAUCGGCCUGGCCAUCGGCACCAACUCCGUGGGCUGGGCCGUGA |
| | | UCACCGACGAGUACAAGGUGCCCUCCAAGAAGUUCAAGGUGCUGGGCAACACCGACCGGCACUCCAUCAAGAAGAACCUGAUC |
| | | GGCGCCCUGCUGUUCGACUCCGGCGAGACCGCCGAGGCCACCCGGCUGAAGCGGACCGCCCGGCGGCGGUACACCCGGCGGAA |
| | | GAACCGGAUCUGCUACCUGCAGGAGAUCUUCUCCAACGAGAUGGCCAAGGUGGACGACUCCUUCUUCCACCGGCUGGAGGAGU |
| | | CCUUCCUGGUGGAGGAGGACAAGAAGCACGAGCGGCACCCCAUCUUCGGCAACAUCGUGGACGAGGUGGCCUACCACGAGAAG |
| | | UACCCCACCAUCUACCACCUGCGGAAGAAGCUGGUGGACUCCACCGACAAGGCCGACCUGCGGCUGAUCUACCUGGCCCUGGC |
| | | CCACAUGAUCAAGUUCCGGGGCCACUUCCUGAUCGAGGGCGACCUGAACCCCGACAACUCCGACGUGGACAAGCUGUUCAUCC |
| | | AGCUGGUGCAGACCUACAACCAGCUGUUCGAGGAGAACCCCAUCAACGCCUCCGGCGUGGACGCCAAGGCCAUCCUGUCCGCC |
| | | CGGCUGUCCAAGUCCCGGCGGCUGGAGAACCUGAUCGCCCAGCUGCCCGGCGAGAAGAAGAACGGCCUGUUCGGCAACCUGAU |
| | | CGCCCUGUCCCUGGGCCUGACCCCCAACUUCAAGUCCAACUUCGACCUGGCCGAGGACGCCAAGCUGCAGCUGUCCAAGGACA |
| | | CCUACGACGACGACCUGGACAACCUGCUGGCCCAGAUCGGCGACCAGUACGCCGACCUGUUCCUGGCCGCCAAGAACCUGUCC |
| | | GACGCCAUCCUGCUGUCCGACAUCCUGCGGGUGAACACCGAGAUCACCAAGGCCCCCCUGUCCGCCUCCAUGAUCAAGCGGUA |
| | | CGACGAGCACCACCAGGACCUGACCCUGCUGAAGGCCCUGGUGCGGCAGCAGCUGCCCGAGAAGUACAAGGAGAUCUUCUUCG |
| | | ACCAGUCCAAGAACGGCUACGCCGGCUACAUCGACGGCGGCGCCUCCCAGGAGGAGUUCUACAAGUUCAUCAAGCCCAUCCUG |
| | | GAGAAGAUGGACGGCACCGAGGAGCUGCUGGUGAAGCUGAACCGGGAGGACCUGCUGCGGAAGCAGCGGACCUUCGACAACGG |
| | | CUCCAUCCCCCACCAGAUCCACCUGGGCGAGCUGCACGCCAUCCUGCGGCGGCAGGAGGACUUCUACCCCUUCCUGAAGGACA |
| | | ACCGGGAGAAGAUCGAGAAGAUCCUGACCUUCCGGAUCCCCUACUACGUGGGCCCCCUGGCCCGGGGCAACUCCCGGUUCGCC |
| | | UGGAUGACCCGGAAGUCCGAGGAGACCAUCACCCCCUGGAACUUCGAGGAGGUGGUGGACAAGGGCGCCUCCGCCCAGUCCUU |
| | | CAUCGAGCGGAUGACCAACUUCGACAAGAACCUGCCCAACGAGAAGGUGCUGCCCAAGCACUCCCUGCUGUACGAGUACUUCA |
| | | CCGUGUACAACGAGCUGACCAAGGUGAAGUACGUGACCGAGGGCAUGCGGAAGCCCGCCUUCCUGUCCGGCGAGCAGAAGAAG |
| | | GCCAUCGUGGACCUGCUGUUCAAGACCAACCGGAAGGUGACCGUGAAGCAGCUGAAGGAGGACUACUUCAAGAAGAUCGAGUG |
| | | CUUCGACUCCGUGGAGAUCUCCGGCGUGGAGGACCGGUUCAACGCCUCCCUGGGCACCUACCACGACCUGCUGAAGAUCAUCA |
| | | AGGACAAGGACUUCCUGGACAACGAGGAGAACGAGGACAUCCUGGAGGACAUCGUGCUGACCCUGACCCUGUUCGAGGACCGG |
| | | GAGAUGAUCGAGGAGCGGCUGAAGACCUACGCCCACCUGUUCGACGACAAGGUGAUGAAGCAGCUGAAGCGGCGGCGGUACAC |
| | | CGGCUGGGGCCGGCUGUCCCGGAAGCUGAUCAACGGCAUCCGGGACAAGCAGUCCGGCAAGACCAUCCUGGACUUCCUGAAGU |
| | | CCGACGGCUUCGCCAACCGGAACUUCAUGCAGCUGAUCCACGACGACUCCCUGACCUUCAAGGAGGACAUCCAGAAGGCCCAG |
| | | GUGUCCGGCCAGGGCGACUCCCUGCACGAGCACAUCGCCAACCUGGCCGGCUCCCCCGCCAUCAAGAAGGGCAUCCUGCAGAC |
| | | CGUGAAGGUGGUGGACGAGCUGGUGAAGGUGAUGGGCCGGCACAAGCCCGAGAACAUCGUGAUCGAGAUGGCCCGGGAGAACC |
| | | AGACCACCCAGAAGGGCCAGAAGAACUCCCGGGAGCGGAUGAAGCGGAUCGAGGAGGGCAUCAAGGAGCUGGGCUCCCAGAUC |
| | | CUGAAGGAGCACCCCGUGGAGAACACCCAGCUGCAGAACGAGAAGCUGUACCUGUACUACCUGCAGAACGGCCGGGACAUGUA |
| | | CGUGGACCAGGAGCUGGACAUCAACCGGCUGUCCGACUACGACGUGGACCACAUCGUGCCCCAGUCCUUCCUGAAGGACGACU |
| | | CCAUCGACAACAAGGUGCUGACCCGGUCCGACAAGAACCGGGGCAAGUCCGACAACGUGCCCUCCGAGGAGGUGGUGAAGAAG |
| | | AUGAAGAACUACUGGCGGCAGCUGCUGAACGCCAAGCUGAUCACCCAGCGGAAGUUCGACAACCUGACCAAGGCCGAGCGGGG |
| | | CGGCCUGUCCGAGCUGGACAAGGCCGGCUUCAUCAAGCGGCAGCUGGUGGAGACCCGGCAGAUCACCAAGCACGUGGCCCAGA |
| | | UCCUGGACUCCCGGAUGAACACCAAGUACGACGAGAACGACAAGCUGAUCCGGGAGGUGAAGGUGAUCACCCUGAAGUCCAAG |
| | | CUGGUGUCCGACUUCCGGAAGGACUUCCAGUUCUACAAGGUGCGGGAGAUCAACAACUACCACCACGCCCACGACGCCUACCU |
| | | GAACGCCGUGGUGGGCACCGCCCUGAUCAAGAAGUACCCCAAGCUGGAGUCCGAGUUCGUGUACGGCGACUACAAGGUGUACG |
| | | ACGUGCGGAAGAUGAUCGCCAAGUCCGAGCAGGAGAUCGGCAAGGCCACCGCCAAGUACUUCUUCUACUCCAACAUCAUGAAC |
| | | UUCUUCAAGACCGAGAUCACCCUGGCCAACGGCGAGAUCCGGAAGCGGCCCCUGAUCGAGACCAACGGCGAGACCGGCGAGAU |
| | | CGUGUGGGACAAGGGCCGGGACUUCGCCACCGUGCGGAAGGUGCUGUCCAUGCCCCAGGUGAACAUCGUGAAGAAGACCGAGG |
| | | UGCAGACCGGCGGCUUCUCCAAGGAGUCCAUCCUGCCCAAGCGGAACUCCGACAAGCUGAUCGCCCGGAAGAAGGACUGGGAC |
| | | CCCAAGAAGUACGGCGGCUUCGACUCCCCCACCGUGGCCUACUCCGUGCUGGUGGUGGCCAAGGUGGAGAAGGGCAAGUCCAA |
| | | GAAGCUGAAGUCCGUGAAGGAGCUGCUGGGCAUCACCAUCAUGGAGCGGUCCUCCUUCGAGAAGAACCCCAUCGACUUCCUGG |
| | | AGGCCAAGGGCUACAAGGAGGUGAAGAAGGACCUGAUCAUCAAGCUGCCCAAGUACUCCCUGUUCGAGCUGGAGAACGGCCGG |
| | | AAGCGGAUGCUGGCCUCCGCCGGCGAGCUGCAGAAGGGCAACGAGCUGGCCCUGCCCUCCAAGUACGUGAACUUCCUGUACCU |
| | | GGCCUCCCACUACGAGAAGCUGAAGGGCUCCCCCGAGGACAACGAGCAGAAGCAGCUGUUCGUGGAGCAGCACAAGCACUACC |
| | | UGGACGAGAUCAUCGAGCAGAUCUCCGAGUUCUCCAAGCGGGUGAUCCUGGCCGACGCCAACCUGGACAAGGUGCUGUCCGCC |
| | | UACAACAAGCACCGGGACAAGCCCAUCCGGGAGCAGGCCGAGAACAUCAUCCACCUGUUCACCCUGACCAACCUGGGCGCCCC |
| | | CGCCGCCUUCAAGUACUUCGACACCACCAUCGACCGGAAGCGGUACACCUCCACCAAGGAGGUGCUGGACGCCACCCUGAUCC |
| | | ACCAGUCCAUCACCGGCCUGUACGAGACCCGGAUCGACCUGUCCCAGCUGGGCGGCGACGGCGGCGGCUCCCCCAAGAAGAAG |
| | | CGGAAGGUGUGACUAGCACCAGCCUCAAGAACACCCGAAUGGAGUCUCUAAGCUACAUAAUACCAACUUACACUUUACAAAAU |
| | | GUUGUCCCCCAAAAUGUAGCCAUUCGUAUCUGCUCCUAAUAAAAAGAAAGUUUCUUCACAUUCUCUCGAGAAAAAAAAAAAAU |
| | | GGAAAAAAAAAAAACGGAAAAAAAAAAAAGGUAAAAAAAAAAAAUAUAAAAAAAAAAAACAUAAAAAAAAAAAACGAAAAAAA |
| | | AAAAACGUAAAAAAAAAAAACUCAAAAAAAAAAAAGAUAAAAAAAAAAAACCUAAAAAAAAAAAAUGUAAAAAAAAAAAAGGG |
| | | AAAAAAAAAAAACGCAAAAAAAAAAAACACAAAAAAAAAAAAUGCAAAAAAAAAAAAUCGAAAAAAAAAAAAUCUAAAAAAAA |
| | | AAAACGAAAAAAAAAAAACCCAAAAAAAAAAAAGACAAAAAAAAAAAAUAGAAAAAAAAAAAAGUUAAAAAAAAAAAACUGAA |
| | | AAAAAAAAAAUUUAAAAAAAAAAAAUCUAG |
| mRNA G | 17 | GGGAAGCUCAGAAUAAACGCUCAACUUUGGCCGGAUCUGCCACCAUGACCAACCUGUCCGACAUCAUCGAGAAGGAGACCGGC |
| encoding | | AAGCAGCUGGUGAUCCAGGAGUCCAUCCUGAUGCUGCCCGAGGAGGUGGAGGAGGUGAUCGGCAACAAGCCCGAGUCCGACAU |
| UGI | | CCUGGUGCACACCGCCUACGACGAGUCCACCGACGAGAACGUGAUGCUGCUGACCUCCGACGCCCCCGAGUACAAGCCCUGGG |
| | | CCCUGGUGAUCCAGGACUCCAACGGCGAGAACAAGAUCAAGAUGCUGUCCGGCGGCUCCAAGCGGACCGCCGACGGCUCCGAG |
| | | UUCGAGUCCCCCAAGAAGAAGCGGAAGGUGGAGUGAUAGCUAGCACCAGCCUCAAGAACACCCGAAUGGAGUCUCUAAGCUAC |
| | | AUAAUACCAACUUACACUUUACAAAAUGUUGUCCCCCAAAAUGUAGCCAUUCGUAUCUGCUCCUAAUAAAAAGAAAGUUUCUU |
| | | CACAUUCUCUCGAGAAAAAAAAAAAAUGGAAAAAAAAAAAACGGAAAAAAAAAAAAGGUAAAAAAAAAAAAUAUAAAAAAAAA |
| | | AAACAUAAAAAAAAAAAACGAAAAAAAAAAAACGUAAAAAAAAAAAACUCAAAAAAAAAAAAGAUAAAAAAAAAAAACCUAAA |
| | | AAAAAAAAAUGUAAAAAAAAAAAAGGGAAAAAAAAAAAACGCAAAAAAAAAAAACACAAAAAAAAAAAAUGCAAAAAAAAAAA |
| | | AUCGAAAAAAAAAAAAUCUAAAAAAAAAAAACGAAAAAAAAAAAACCCAAAAAAAAAAAAGACAAAAAAAAAAAAUAGAAAAA |
| | | AAAAAAAGUUAAAAAAAAAAAACUGAAAAAAAAAAAAUUUAAAAAAAAAAAAUCUAG |
| mRNA H | 18 | GGGaagctcagaataaacgctcaactttggccggatctgccacCATGGCCGCCTTCAAGCCCAACCCCATCAACTACATCCTG |
| encoding | | GGCCTGGACATCGGCATCGCCTCCGTGGGCTGGGCCATGGTGGAGATCGACGAGGAGGAGAACCCCATCCGGCTGATCGACCT |
| Nme2Cas9 | | GGGCGTGCGGGTGTTCGAGCGGGCCGAGGTGCCCAAGACCGGCGACTCCCTGGCCATGGCCCGGCGGCTGGCCCGGTCCGTGC |
| | | GGCGGCTGACCCGGCGGCGGGCCCACCGGCTGCTGCGGGCCCGGCGGCTGCTGAAGCGGGAGGGCGTGCTGCAGGCCGCCGAC |
| | | TTCGACGAGAACGGCCTGATCAAGTCCCTGCCCAACACCCCCTGGCAGCTGCGGGCCGCCGCCCTGGACCGGAAGCTGACCCC |
| | | CCTGGAGTGGTCCGCCGTGCTGCTGCACCTGATCAAGCACCGGGGCTACCTGTCCCAGCGGAAGAACGAGGGCGAGACCGCCG |
| | | ACAAGGAGCTGGGCGCCCTGCTGAAGGGCGTGGCCAACAACGCCCACGCCCTGCAGACCGGCGACTTCCGGACCCCCGCCGAG |
| | | CTGGCCCTGAACAAGTTCGAGAAGGAGTCCGGCCACATCCGGAACCAGCGGGGCGACTACTCCCACACCTTCTCCCGGAAGGA |
| | | CCTGCAGGCCGAGCTGATCCTGCTGTTCGAGAAGCAGAAGGAGTTCGGCAACCCCCACGTGTCCGGCGGCCTGAAGGAGGGCA |
| | | TCGAGACCCTGCTGATGACCCAGCGGCCCGCCCTGTCCGGCGACGCCGTGCAGAAGATGCTGGGCCACTGCACCTTCGAGCCC |
| | | GCCGAGCCCAAGGCCGCCAAGAACACCTACACCGCCGAGCGGTTCATCTGGCTGACCAAGCTGAACAACCTGCGGATCCTGGA |
| | | GCAGGGCTCCGAGCGGCCCCTGACCGACACCGAGCGGGCCACCCTGATGGACGAGCCCTACCGGAAGTCCAAGCTGACCTACG |
| | | CCCAGGCCCGGAAGCTGCTGGGCCTGGAGGACACCGCCTTCTTCAAGGGCCTGCGGTACGGCAAGGACAACGCCGAGGCCTCC |
| | | ACCCTGATGGAGATGAAGGCCTACCACGCCATCTCCCGGGCCCTGGAGAAGGAGGGCCTGAAGGACAAGAAGTCCCCCCTGAA |
| | | CCTGTCCTCCGAGCTGCAGGACGAGATCGGCACCGCCTTCTCCCTGTTCAAGACCGACGAGGACATCACCGGCCGGCTGAAGG |
| | | ACCGGGTGCAGCCCGAGATCCTGGAGGCCCTGCTGAAGCACATCTCCTTCGACAAGTTCGTGCAGATCTCCCTGAAGGCCCTG |
| | | CGGCGGATCGTGCCCCTGATGGAGCAGGGCAAGCGGTACGACGAGGCCTGCGCCGAGATCTACGGCGACCACTACGGCAAGAA |
| | | GAACACCGAGGAGAAGATCTACCTGCCCCCCATCCCCGCCGACGAGATCCGGAACCCCGTGGTGCTGCGGGCCCTGTCCCAGG |
| | | CCCGGAAGGTGATCAACGGCGTGGTGCGGCGGTACGGCTCCCCCGCCCGGATCCACATCGAGACCGCCCGGGAGGTGGGCAAG |
| | | TCCTTCAAGGACCGGAAGGAGATCGAGAAGCGGCAGGAGGAGAACCGGAAGGACCGGGAGAAGGCCGCCGCCAAGTTCCGGGA |
| | | GTACTTCCCCAACTTCGTGGGCGAGCCCAAGTCCAAGGACATCCTGAAGCTGCGGCTGTACGAGCAGCAGCACGGCAAGTGCC |
| | | TGTACTCCGGCAAGGAGATCAACCTGGTGCGGCTGAACGAGAAGGGCTACGTGGAGATCGACCACGCCCTGCCCTTCTCCCGG |
| | | ACCTGGGACGACTCCTTCAACAACAAGGTGCTGGTGCTGGGCTCCGAGAACCAGAACAAGGGCAACCAGACCCCCTACGAGTA |
| | | CTTCAACGGCAAGGACAACTCCCGGGAGTGGCAGGAGTTCAAGGCCCGGGTGGAGACCTCCCGGTTCCCCCGGTCCAAGAAGC |
| | | AGCGGATCCTGCTGCAGAAGTTCGACGAGGACGGCTTCAAGGAGTGCAACCTGAACGACACCCGGTACGTGAACCGGTTCCTG |
| | | TGCCAGTTCGTGGCCGACCACATCCTGCTGACCGGCAAGGGCAAGCGGCGGGTGTTCGCCTCCAACGGCCAGATCACCAACCT |
| | | GCTGCGGGGCTTCTGGGGCCTGCGGAAGGTGCGGGCCGAGAACGACCGGCACCACGCCCTGGACGCCGTGGTGGTGGCCTGCT |
| | | CCACCGTGGCCATGCAGCAGAAGATCACCCGGTTCGTGCGGTACAAGGAGATGAACGCCTTCGACGGCAAGACCATCGACAAG |
| | | GAGACCGGCAAGGTGCTGCACCAGAAGACCCACTTCCCCCAGCCCTGGGAGTTCTTCGCCCAGGAGGTGATGATCCGGGTGTT |
| | | CGGCAAGCCCGACGGCAAGCCCGAGTTCGAGGAGGCCGACACCCCCGAGAAGCTGCGGACCCTGCTGGCCGAGAAGCTGTCCT |
| | | CCCGGCCCGAGGCCGTGCACGAGTACGTGACCCCCCTGTTCGTGTCCCGGGCCCCCAACCGGAAGATGTCCGGCGCCCACAAG |
| | | GACACCCTGCGGTCCGCCAAGCGGTTCGTGAAGCACAACGAGAAGATCTCCGTGAAGCGGGTGTGGCTGACCGAGATCAAGCT |
| | | GGCCGACCTGGAGAACATGGTGAACTACAAGAACGGCCGGGAGATCGAGCTGTACGAGGCCCTGAAGGCCCGGCTGGAGGCCT |
| | | ACGGCGGCAACGCCAAGCAGGCCTTCGACCCCAAGGACAACCCCTTCTACAAGAAGGGCGGCCAGCTGGTGAAGGCCGTGCGG |
| | | GTGGAGAAGACCCAGGAGTCCGGCGTGCTGCTGAACAAGAAGAACGCCTACACCATCGCCGACAACGGCGACATGGTGCGGGT |
| | | GGACGTGTTCTGCAAGGTGGACAAGTCCGGCGGCGGCTCCCCCAAGAAGAAGCGGAAGGTGTCCGGCGGCTCCGGCAAGAACC |
| | | AGTACTTCATCGTGCCCATCTACGCCTGGCAGGTGGCCGAGAACATCCTGCCCGACATCGACTGCAAGGGCTACCGGATCGAC |
| | | GACTCCTACACCTTCTGCTTCTCCCTGCACAAGTACGACCTGATCGCCTTCCAGAAGGACGAGAAGTCCAAGGTGGAGTTCGC |
| | | CTACTACATCAACTGCGACTCCTCCAACGGCCGGTTCTACCTGGCCTGGCACGACAAGGGCTCCAAGGAGCAGCAGTTCCGGA |
| | | TCTCCACCCAGAACCTGGTGCTGATCCAGAAGTACCAGGTGAACGAGCTGGGCAAGGAGATCCGGCCCTGCCGGCTGAAGAAG |
| | | CGGCCCCCCGTGCGGTAGCTAGCaccagcctcaagaacacccgaatggagtctctaagctacataataccaacttacacttta |
| | | caaaatgttgtcccccaaaatgtagccattcgtatctgctcctaataaaaagaaagtttcttcacattctCTCGAGAAAAAAA |
| | | AAAAATGGAAAAAAAAAAAACGGAAAAAAAAAAAAGGTAAAAAAAAAAAATATAAAAAAAAAAAACATAAAAAAAAAAAACGA |
| | | AAAAAAAAAAACGTAAAAAAAAAAAACTCAAAAAAAAAAAAGATAAAAAAAAAAAACCTAAAAAAAAAAAATGTAAAAAAAAA |
| | | AAAGGGAAAAAAAAAAAACGCAAAAAAAAAAAACACAAAAAAAAAAAATGCAAAAAAAAAAAATCGAAAAAAAAAAAATCTAA |
| | | AAAAAAAAAACGAAAAAAAAAAAACCCAAAAAAAAAAAAGACAAAAAAAAAAAATAGAAAAAAAAAAAAGTTAAAAAAAAAAA |
| | | ACTGAAAAAAAAAAAATTTAAAAAAAAAAAAT |
| mRNA I | 19 | GGGaagctcagaataaacgctcaactttggccggatctgccacCATGGTGCCCAAGAAGAAGCGGAAGGTGGCCGCCTTCAAG |
| encoding | | CCCAACCCCATCAACTACATCCTGGGCCTGGACATCGGCATCGCCTCCGTGGGCTGGGCCATGGTGGAGATCGACGAGGAGGA |
| Nme2Cas9 | | GAACCCCATCCGGCTGATCGACCTGGGCGTGCGGGTGTTCGAGCGGGCCGAGGTGCCCAAGACCGGCGACTCCCTGGCCATGG |
| | | CCCGGCGGCTGGCCCGGTCCGTGCGGCGGCTGACCCGGCGGCGGGCCCACCGGCTGCTGCGGGCCCGGCGGCTGCTGAAGCGG |
| | | GAGGGCGTGCTGCAGGCCGCCGACTTCGACGAGAACGGCCTGATCAAGTCCCTGCCCAACACCCCCTGGCAGCTGCGGGCCGC |
| | | CGCCCTGGACCGGAAGCTGACCCCCCTGGAGTGGTCCGCCGTGCTGCTGCACCTGATCAAGCACCGGGGCTACCTGTCCCAGC |
| | | GGAAGAACGAGGGCGAGACCGCCGACAAGGAGCTGGGCGCCCTGCTGAAGGGCGTGGCCAACAACGCCCACGCCCTGCAGACC |
| | | GGCGACTTCCGGACCCCCGCCGAGCTGGCCCTGAACAAGTTCGAGAAGGAGTCCGGCCACATCCGGAACCAGCGGGGCGACTA |
| | | CTCCCACACCTTCTCCCGGAAGGACCTGCAGGCCGAGCTGATCCTGCTGTTCGAGAAGCAGAAGGAGTTCGGCAACCCCCACG |
| | | TGTCCGGCGGCCTGAAGGAGGGCATCGAGACCCTGCTGATGACCCAGCGGCCCGCCCTGTCCGGCGACGCCGTGCAGAAGATG |
| | | CTGGGCCACTGCACCTTCGAGCCCGCCGAGCCCAAGGCCGCCAAGAACACCTACACCGCCGAGCGGTTCATCTGGCTGACCAA |
| | | GCTGAACAACCTGCGGATCCTGGAGCAGGGCTCCGAGCGGCCCCTGACCGACACCGAGCGGGCCACCCTGATGGACGAGCCCT |
| | | ACCGGAAGTCCAAGCTGACCTACGCCCAGGCCCGGAAGCTGCTGGGCCTGGAGGACACCGCCTTCTTCAAGGGCCTGCGGTAC |
| | | GGCAAGGACAACGCCGAGGCCTCCACCCTGATGGAGATGAAGGCCTACCACGCCATCTCCCGGGCCCTGGAGAAGGAGGGCCT |
| | | GAAGGACAAGAAGTCCCCCCTGAACCTGTCCTCCGAGCTGCAGGACGAGATCGGCACCGCCTTCTCCCTGTTCAAGACCGACG |
| | | AGGACATCACCGGCCGGCTGAAGGACCGGGTGCAGCCCGAGATCCTGGAGGCCCTGCTGAAGCACATCTCCTTCGACAAGTTC |
| | | GTGCAGATCTCCCTGAAGGCCCTGCGGCGGATCGTGCCCCTGATGGAGCAGGGCAAGCGGTACGACGAGGCCTGCGCCGAGAT |
| | | CTACGGCGACCACTACGGCAAGAAGAACACCGAGGAGAAGATCTACCTGCCCCCCATCCCCGCCGACGAGATCCGGAACCCCG |
| | | TGGTGCTGCGGGCCCTGTCCCAGGCCCGGAAGGTGATCAACGGCGTGGTGCGGCGGTACGGCTCCCCCGCCCGGATCCACATC |
| | | GAGACCGCCCGGGAGGTGGGCAAGTCCTTCAAGGACCGGAAGGAGATCGAGAAGCGGCAGGAGGAGAACCGGAAGGACCGGGA |
| | | GAAGGCCGCCGCCAAGTTCCGGGAGTACTTCCCCAACTTCGTGGGCGAGCCCAAGTCCAAGGACATCCTGAAGCTGCGGCTGT |
| | | ACGAGCAGCAGCACGGCAAGTGCCTGTACTCCGGCAAGGAGATCAACCTGGTGCGGCTGAACGAGAAGGGCTACGTGGAGATC |
| | | GACCACGCCCTGCCCTTCTCCCGGACCTGGGACGACTCCTTCAACAACAAGGTGCTGGTGCTGGGCTCCGAGAACCAGAACAA |
| | | GGGCAACCAGACCCCCTACGAGTACTTCAACGGCAAGGACAACTCCCGGGAGTGGCAGGAGTTCAAGGCCCGGGTGGAGACCT |
| | | CCCGGTTCCCCCGGTCCAAGAAGCAGCGGATCCTGCTGCAGAAGTTCGACGAGGACGGCTTCAAGGAGTGCAACCTGAACGAC |
| | | ACCCGGTACGTGAACCGGTTCCTGTGCCAGTTCGTGGCCGACCACATCCTGCTGACCGGCAAGGGCAAGCGGCGGGTGTTCGC |
| | | CTCCAACGGCCAGATCACCAACCTGCTGCGGGGCTTCTGGGGCCTGCGGAAGGTGCGGGCCGAGAACGACCGGCACCACGCCC |
| | | TGGACGCCGTGGTGGTGGCCTGCTCCACCGTGGCCATGCAGCAGAAGATCACCCGGTTCGTGCGGTACAAGGAGATGAACGCC |
| | | TTCGACGGCAAGACCATCGACAAGGAGACCGGCAAGGTGCTGCACCAGAAGACCCACTTCCCCCAGCCCTGGGAGTTCTTCGC |
| | | CCAGGAGGTGATGATCCGGGTGTTCGGCAAGCCCGACGGCAAGCCCGAGTTCGAGGAGGCCGACACCCCCGAGAAGCTGCGGA |
| | | CCCTGCTGGCCGAGAAGCTGTCCTCCCGGCCCGAGGCCGTGCACGAGTACGTGACCCCCCTGTTCGTGTCCCGGGCCCCCAAC |
| | | CGGAAGATGTCCGGCGCCCACAAGGACACCCTGCGGTCCGCCAAGCGGTTCGTGAAGCACAACGAGAAGATCTCCGTGAAGCG |
| | | GGTGTGGCTGACCGAGATCAAGCTGGCCGACCTGGAGAACATGGTGAACTACAAGAACGGCCGGGAGATCGAGCTGTACGAGG |
| | | CCCTGAAGGCCCGGCTGGAGGCCTACGGCGGCAACGCCAAGCAGGCCTTCGACCCCAAGGACAACCCCTTCTACAAGAAGGGC |
| | | GGCCAGCTGGTGAAGGCCGTGCGGGTGGAGAAGACCCAGGAGTCCGGCGTGCTGCTGAACAAGAAGAACGCCTACACCATCGC |
| | | CGACAACGGCGACATGGTGCGGGTGGACGTGTTCTGCAAGGTGGACAAGAAGGGCAAGAACCAGTACTTCATCGTGCCCATCT |
| | | ACGCCTGGCAGGTGGCCGAGAACATCCTGCCCGACATCGACTGCAAGGGCTACCGGATCGACGACTCCTACACCTTCTGCTTC |
| | | TCCCTGCACAAGTACGACCTGATCGCCTTCCAGAAGGACGAGAAGTCCAAGGTGGAGTTCGCCTACTACATCAACTGCGACTC |
| | | CTCCAACGGCCGGTTCTACCTGGCCTGGCACGACAAGGGCTCCAAGGAGCAGCAGTTCCGGATCTCCACCCAGAACCTGGTGC |
| | | TGATCCAGAAGTACCAGGTGAACGAGCTGGGCAAGGAGATCCGGCCCTGCCGGCTGAAGAAGCGGCCCCCCGTGCGGTACCCC |
| | | TACGACGTGCCCGACTACGCCGCCGCCCCCGCCGCCAAGAAGAAGAAGCTGGACTAGCTAGCaccagcctcaagaacacccga |
| | | atggagtctctaagctacataataccaacttacactttacaaaatgttgtcccccaaaatgtagccattcgtatctgctccta |
| | | ataaaaagaaagtttcttcacattctCTCGAGAAAAAAAAAAAATGGAAAAAAAAAAAACGGAAAAAAAAAAAAGGTAAAAAA |
| | | AAAAAATATAAAAAAAAAAAACATAAAAAAAAAAAACGAAAAAAAAAAAACGTAAAAAAAAAAAACTCAAAAAAAAAAAAGAT |
| | | AAAAAAAAAAAACCTAAAAAAAAAAAATGTAAAAAAAAAAAAGGGAAAAAAAAAAAACGCAAAAAAAAAAAACACAAAAAAAA |
| | | AAAATGCAAAAAAAAAAAATCGAAAAAAAAAAAATCTAAAAAAAAAAAACGAAAAAAAAAAAACCCAAAAAAAAAAAAGACAA |
| | | AAAAAAAAAATAGAAAAAAAAAAAAGTTAAAAAAAAAAAACTGAAAAAAAAAAAATTTAAAAAAAAAAAAT |
| mRNA J | 20 | GGGAAGCUCAGAAUAAACGCUCAACUUUGGCCGGAUCUGCCACCAUGGUGCCCAAGAAGAAGCGGAAGGUGGAGGACAAGCGG |
| encoding | | CCCGCCGCCACCAAGAAGGCCGGCCAGGCCAAGAAGAAGAAGAUGGCCGCCUUCAAGCCCAACCCCAUCAACUACAUCCUGGG |
| Nme2Cas9 | | CCUGGACAUCGGCAUCGCCUCCGUGGGCUGGGCCAUGGUGGAGAUCGACGAGGAGGAGAACCCCAUCCGGCUGAUCGACCUGG |
| | | GCGUGCGGGUGUUCGAGCGGGCCGAGGUGCCCAAGACCGGCGACUCCCUGGCCAUGGCCCGGCGGCUGGCCCGGUCCGUGCGG |
| | | CGGCUGACCCGGCGGCGGGCCCACCGGCUGCUGCGGGCCCGGCGGCUGCUGAAGCGGGAGGGCGUGCUGCAGGCCGCCGACUU |
| | | CGACGAGAACGGCCUGAUCAAGUCCCUGCCCAACACCCCCUGGCAGCUGCGGGCCGCCGCCCUGGACCGGAAGCUGACCCCCC |
| | | UGGAGUGGUCCGCCGUGCUGCUGCACCUGAUCAAGCACCGGGGCUACCUGUCCCAGCGGAAGAACGAGGGCGAGACCGCCGAC |
| | | AAGGAGCUGGGCGCCCUGCUGAAGGGCGUGGCCAACAACGCCCACGCCCUGCAGACCGGCGACUUCCGGACCCCCGCCGAGCU |
| | | GGCCCUGAACAAGUUCGAGAAGGAGUCCGGCCACAUCCGGAACCAGCGGGGCGACUACUCCCACACCUUCUCCCGGAAGGACC |
| | | UGCAGGCCGAGCUGAUCCUGCUGUUCGAGAAGCAGAAGGAGUUCGGCAACCCCCACGUGUCCGGCGGCCUGAAGGAGGGCAUC |
| | | GAGACCCUGCUGAUGACCCAGCGGCCCGCCCUGUCCGGCGACGCCGUGCAGAAGAUGCUGGGCCACUGCACCUUCGAGCCCGC |
| | | CGAGCCCAAGGCCGCCAAGAACACCUACACCGCCGAGCGGUUCAUCUGGCUGACCAAGCUGAACAACCUGCGGAUCCUGGAGC |
| | | AGGGCUCCGAGCGGCCCCUGACCGACACCGAGCGGGCCACCCUGAUGGACGAGCCCUACCGGAAGUCCAAGCUGACCUACGCC |
| | | CAGGCCCGGAAGCUGCUGGGCCUGGAGGACACCGCCUUCUUCAAGGGCCUGCGGUACGGCAAGGACAACGCCGAGGCCUCCAC |
| | | CCUGAUGGAGAUGAAGGCCUACCACGCCAUCUCCCGGGCCCUGGAGAAGGAGGGCCUGAAGGACAAGAAGUCCCCCCUGAACC |
| | | UGUCCUCCGAGCUGCAGGACGAGAUCGGCACCGCCUUCUCCCUGUUCAAGACCGACGAGGACAUCACCGGCCGGCUGAAGGAC |
| | | CGGGUGCAGCCCGAGAUCCUGGAGGCCCUGCUGAAGCACAUCUCCUUCGACAAGUUCGUGCAGAUCUCCCUGAAGGCCCUGCG |
| | | GCGGAUCGUGCCCCUGAUGGAGCAGGGCAAGCGGUACGACGAGGCCUGCGCCGAGAUCUACGGCGACCACUACGGCAAGAAGA |
| | | ACACCGAGGAGAAGAUCUACCUGCCCCCCAUCCCCGCCGACGAGAUCCGGAACCCCGUGGUGCUGCGGGCCCUGUCCCAGGCC |
| | | CGGAAGGUGAUCAACGGCGUGGUGCGGCGGUACGGCUCCCCCGCCCGGAUCCACAUCGAGACCGCCCGGGAGGUGGGCAAGUC |
| | | CUUCAAGGACCGGAAGGAGAUCGAGAAGCGGCAGGAGGAGAACCGGAAGGACCGGGAGAAGGCCGCCGCCAAGUUCCGGGAGU |
| | | ACUUCCCCAACUUCGUGGGCGAGCCCAAGUCCAAGGACAUCCUGAAGCUGCGGCUGUACGAGCAGCAGCACGGCAAGUGCCUG |
| | | UACUCCGGCAAGGAGAUCAACCUGGUGCGGCUGAACGAGAAGGGCUACGUGGAGAUCGACCACGCCCUGCCCUUCUCCCGGAC |
| | | CUGGGACGACUCCUUCAACAACAAGGUGCUGGUGCUGGGCUCCGAGAACCAGAACAAGGGCAACCAGACCCCCUACGAGUACU |
| | | UCAACGGCAAGGACAACUCCCGGGAGUGGCAGGAGUUCAAGGCCCGGGUGGAGACCUCCCGGUUCCCCCGGUCCAAGAAGCAG |
| | | CGGAUCCUGCUGCAGAAGUUCGACGAGGACGGCUUCAAGGAGUGCAACCUGAACGACACCCGGUACGUGAACCGGUUCCUGUG |
| | | CCAGUUCGUGGCCGACCACAUCCUGCUGACCGGCAAGGGCAAGCGGCGGGUGUUCGCCUCCAACGGCCAGAUCACCAACCUGC |
| | | UGCGGGGCUUCUGGGGCCUGCGGAAGGUGCGGGCCGAGAACGACCGGCACCACGCCCUGGACGCCGUGGUGGUGGCCUGCUCC |
| | | ACCGUGGCCAUGCAGCAGAAGAUCACCCGGUUCGUGCGGUACAAGGAGAUGAACGCCUUCGACGGCAAGACCAUCGACAAGGA |
| | | GACCGGCAAGGUGCUGCACCAGAAGACCCACUUCCCCCAGCCCUGGGAGUUCUUCGCCCAGGAGGUGAUGAUCCGGGUGUUCG |
| | | GCAAGCCCGACGGCAAGCCCGAGUUCGAGGAGGCCGACACCCCCGAGAAGCUGCGGACCCUGCUGGCCGAGAAGCUGUCCUCC |
| | | CGGCCCGAGGCCGUGCACGAGUACGUGACCCCCCUGUUCGUGUCCCGGGCCCCCAACCGGAAGAUGUCCGGCGCCCACAAGGA |
| | | CACCCUGCGGUCCGCCAAGCGGUUCGUGAAGCACAACGAGAAGAUCUCCGUGAAGCGGGUGUGGCUGACCGAGAUCAAGCUGG |
| | | CCGACCUGGAGAACAUGGUGAACUACAAGAACGGCCGGGAGAUCGAGCUGUACGAGGCCCUGAAGGCCCGGCUGGAGGCCUAC |
| | | GGCGGCAACGCCAAGCAGGCCUUCGACCCCAAGGACAACCCCUUCUACAAGAAGGGCGGCCAGCUGGUGAAGGCCGUGCGGGU |
| | | GGAGAAGACCCAGGAGUCCGGCGUGCUGCUGAACAAGAAGAACGCCUACACCAUCGCCGACAACGGCGACAUGGUGCGGGUGG |
| | | ACGUGUUCUGCAAGGUGGACAAGAAGGGCAAGAACCAGUACUUCAUCGUGCCCAUCUACGCCUGGCAGGUGGCCGAGAACAUC |
| | | CUGCCCGACAUCGACUGCAAGGGCUACCGGAUCGACGACUCCUACACCUUCUGCUUCUCCCUGCACAAGUACGACCUGAUCGC |
| | | CUUCCAGAAGGACGAGAAGUCCAAGGUGGAGUUCGCCUACUACAUCAACUGCGACUCCUCCAACGGCCGGUUCUACCUGGCCU |
| | | GGCACGACAAGGGCUCCAAGGAGCAGCAGUUCCGGAUCUCCACCCAGAACCUGGUGCUGAUCCAGAAGUACCAGGUGAACGAG |
| | | CUGGGCAAGGAGAUCCGGCCCUGCCGGCUGAAGAAGCGGCCCCCCGUGCGGGAGGACAAGCGGCCCGCCGCCACCAAGAAGGC |
| | | CGGCCAGGCCAAGAAGAAGAAGUACCCCUACGACGUGCCCGACUACGCCGGCUACCCCUACGACGUGCCCGACUACGCCGGCU |
| | | CCUACCCCUACGACGUGCCCGACUACGCCGCCGCCCCCGCCGCCAAGAAGAAGAAGCUGGACUAGCUAGCACCAGCCUCAAGA |
| | | ACACCCGAAUGGAGUCUCUAAGCUACAUAAUACCAACUUACACUUUACAAAAUGUUGUCCCCCAAAAUGUAGCCAUUCGUAUC |
| | | UGCUCCUAAUAAAAAGAAAGUUUCUUCACAUUCUCUCGAGAAAAAAAAAAAAUGGAAAAAAAAAAAACGGAAAAAAAAAAAAG |
| | | GUAAAAAAAAAAAAUAUAAAAAAAAAAAACAUAAAAAAAAAAAACGAAAAAAAAAAAACGUAAAAAAAAAAAACUCAAAAAAA |
| | | AAAAAGAUAAAAAAAAAAAACCUAAAAAAAAAAAAUGUAAAAAAAAAAAAGGGAAAAAAAAAAAACGCAAAAAAAAAAAACAC |
| | | AAAAAAAAAAAAUGCAAAAAAAAAAAAUCGAAAAAAAAAAAAUCUAAAAAAAAAAAACGAAAAAAAAAAAACCCAAAAAAAAA |
| | | AAAGACAAAAAAAAAAAAUAGAAAAAAAAAAAAGUUAAAAAAAAAAAACUGAAAAAAAAAAAAUUUAAAAAAAAAAAAUCUAG |
| mRNA K | 21 | GGGaagctcagaataaacgctcaactttggccggatctgccacCatggccgccttcaagcccaaccccatcaactacatcctg |
| encoding | | ggcctggacatcggcatcgcctccgtgggctgggccatggtggagatcgacgaggaggagaaccccatccggctgatcgacct |
| Nme2Cas9 | | gggcgtgcgggtgttcgagcgggccgaggtgcccaagaccggcgactccctggccatggcccggcggctggcccggtccgtgc |
| | | ggcggctgacccggcggcgggcccaccggctgctgcgggcccggcggctgctgaagcgggagggcgtgctgcaggccgccgac |
| | | ttcgacgagaacggcctgatcaagtccctgcccaacaccccctggcagctgcgggccgccgccctggaccggaagctgacccc |
| | | cctggagtggtccgccgtgctgctgcacctgatcaagcaccggggctacctgtcccagcggaagaacgagggcgagaccgccg |
| | | acaaggagctgggcgccctgctgaagggcgtggccaacaacgcccacgccctgcagaccggcgacttccggacccccgccgag |
| | | ctggccctgaacaagttcgagaaggagtccggccacatccggaaccagcggggcgactactcccacaccttctcccggaagga |
| | | cctgcaggccgagctgatcctgctgttcgagaagcagaaggagttcggcaacccccacgtgtccggcggcctgaaggagggca |
| | | tcgagaccctgctgatgacccagcggcccgccctgtccggcgacgccgtgcagaagatgctgggccactgcaccttcgagccc |
| | | gccgagcccaaggccgccaagaacacctacaccgccgagcggttcatctggctgaccaagctgaacaacctgcggatcctgga |
| | | gcagggctccgagcggcccctgaccgacaccgagcgggccaccctgatggacgagccctaccggaagtccaagctgacctacg |
| | | cccaggcccggaagctgctgggcctggaggacaccgccttcttcaagggcctgcggtacggcaaggacaacgccgaggcctcc |
| | | accctgatggagatgaaggcctaccacgccatctcccgggccctggagaaggagggcctgaaggacaagaagtcccccctgaa |
| | | cctgtcctccgagctgcaggacgagatcggcaccgccttctccctgttcaagaccgacgaggacatcaccggccggctgaagg |
| | | accgggtgcagcccgagatcctggaggccctgctgaagcacatctccttcgacaagttcgtgcagatctccctgaaggccctg |
| | | cggcggatcgtgcccctgatggagcagggcaagcggtacgacgaggcctgcgccgagatctacggcgaccactacggcaagaa |
| | | gaacaccgaggagaagatctacctgccccccatccccgccgacgagatccggaaccccgtggtgctgcgggccctgtcccagg |
| | | cccggaaggtgatcaacggcgtggtgcggcggtacggctcccccgcccggatccacatcgagaccgcccgggaggtgggcaag |
| | | tccttcaaggaccggaaggagatcgagaagcggcaggaggagaaccggaaggaccgggagaaggccgccgccaagttccggga |
| | | gtacttccccaacttcgtgggcgagcccaagtccaaggacatcctgaagctgcggctgtacgagcagcagcacggcaagtgcc |
| | | tgtactccggcaaggagatcaacctggtgcggctgaacgagaagggctacgtggagatcgaccacgccctgcccttctcccgg |
| | | acctgggacgactccttcaacaacaaggtgctggtgctgggctccgagaaccagaacaagggcaaccagaccccctacgagta |
| | | cttcaacggcaaggacaactcccgggagtggcaggagttcaaggcccgggtggagacctcccggttcccccggtccaagaagc |
| | | agcggatcctgctgcagaagttcgacgaggacggcttcaaggagtgcaacctgaacgacacccggtacgtgaaccggttcctg |
| | | tgccagttcgtggccgaccacatcctgctgaccggcaagggcaagcggcgggtgttcgcctccaacggccagatcaccaacct |
| | | gctgcggggcttctggggcctgcggaaggtgcgggccgagaacgaccggcaccacgccctggacgccgtggtggtggcctgct |
| | | ccaccgtggccatgcagcagaagatcacccggttcgtgcggtacaaggagatgaacgccttcgacggcaagaccatcgacaag |
| | | gagaccggcaaggtgctgcaccagaagacccacttcccccagccctgggagttcttcgcccaggaggtgatgatccgggtgtt |
| | | cggcaagcccgacggcaagcccgagttcgaggaggccgacacccccgagaagctgcggaccctgctggccgagaagctgtcct |
| | | cccggcccgaggccgtgcacgagtacgtgacccccctgttcgtgtcccgggcccccaaccggaagatgtccggcgcccacaag |
| | | gacaccctgcggtccgccaagcggttcgtgaagcacaacgagaagatctccgtgaagcgggtgtggctgaccgagatcaagct |
| | | ggccgacctggagaacatggtgaactacaagaacggccgggagatcgagctgtacgaggccctgaaggcccggctggaggcct |
| | | acggcggcaacgccaagcaggccttcgaccccaaggacaaccccttctacaagaagggcggccagctggtgaaggccgtgcgg |
| | | gtggagaagacccaggagtccggcgtgctgctgaacaagaagaacgcctacaccatcgccgacaacggcgacatggtgcgggt |
| | | ggacgtgttctgcaaggtggacaagaagggcaagaaccagtacttcatcgtgcccatctacgcctggcaggtggccgagaaca |
| | | tcctgcccgacatcgactgcaagggctaccggatcgacgactcctacaccttctgcttctccctgcacaagtacgacctgatc |
| | | gccttccagaaggacgagaagtccaaggtggagttcgcctactacatcaactgcgactcctccaacggccggttctacctggc |
| | | ctggcacgacaagggctccaaggagcagcagttccggatctccacccagaacctggtgctgatccagaagtaccaggtgaacg |
| | | agctgggcaaggagatccggccctgccggctgaagaagcggccccccgtgcggTCCGGAAAGCGGACCGCCGACGGCTCCGGA |
| | | GGAGGAAGCCCCAAGAAGAAGCGGAAGGTGtagctagcaccagcctcaagaacacccgaatggagtctctaagctacataata |
| | | ccaacttacactttacaaaatgttgtcccccaaaatgtagccattcgtatctgctcctaataaaaagaaagtttcttcacatt |
| | | ctctcgagAAAAAAAAAAAATGGAAAAAAAAAAAACGGAAAAAAAAAAAAGGTAAAAAAAAAAAATATAAAAAAAAAAAACAT |
| | | AAAAAAAAAAAACGAAAAAAAAAAAACGTAAAAAAAAAAACTCAAAAAAAAAAAGATAAAAAAAAAAAACCTAAAAAAAAAAA |
| | | ATGTAAAAAAAAAAAAGGGAAAAAAAAAAAACGCAAAAAAAAAAAACACAAAAAAAAAAAATGCAAAAAAAAAAAATCGAAAA |
| | | AAAAAAAATCTAAAAAAAAAAAACGAAAAAAAAAAAACCCAAAAAAAAAAAAGACAAAAAAAAAAAATAGAAAAAAAAAAAGT |
| | | TAAAAAAAAAAAACTGAAAAAAAAAAAATTTAAAAAAAAAAAAT |
| mRNA L | 22 | GGGaagctcagaataaacgctcaactttggccggatctgccacCatgGACGGCTCCGGCGGCGGCTCCCCCAAGAAGAAGCGG |
| encoding | | AAGGTGGGCGGCTCCGGCGGCGGCgccgccttcaagcccaaccccatcaactacatcctgggcctggacatcggcatcgcctc |
| Nme2Cas9 | | cgtgggctgggccatggtggagatcgacgaggaggagaaccccatccggctgatcgacctgggcgtgcgggtgttcgagcggg |
| | | ccgaggtgcccaagaccggcgactccctggccatggcccggcggctggcccggtccgtgcggcggctgacccggcggcgggcc |
| | | caccggctgctgcgggcccggcggctgctgaagcgggagggcgtgctgcaggccgccgacttcgacgagaacggcctgatcaa |
| | | gtccctgcccaacaccccctggcagctgcgggccgccgccctggaccggaagctgacccccctggagtggtccgccgtgctgc |
| | | tgcacctgatcaagcaccggggctacctgtcccagcggaagaacgagggcgagaccgccgacaaggagctgggcgccctgctg |
| | | aagggcgtggccaacaacgcccacgccctgcagaccggcgacttccggacccccgccgagctggccctgaacaagttcgagaa |
| | | ggagtccggccacatccggaaccagcggggcgactactcccacaccttctcccggaaggacctgcaggccgagctgatcctgc |
| | | tgttcgagaagcagaaggagttcggcaacccccacgtgtccggcggcctgaaggagggcatcgagaccctgctgatgacccag |
| | | cggcccgccctgtccggcgacgccgtgcagaagatgctgggccactgcaccttcgagcccgccgagcccaaggccgccaagaa |
| | | cacctacaccgccgagcggttcatctggctgaccaagctgaacaacctgcggatcctggagcagggctccgagcggcccctga |
| | | ccgacaccgagcgggccaccctgatggacgagccctaccggaagtccaagctgacctacgcccaggcccggaagctgctgggc |
| | | ctggaggacaccgccttcttcaagggcctgcggtacggcaaggacaacgccgaggcctccaccctgatggagatgaaggccta |
| | | ccacgccatctcccgggccctggagaaggagggcctgaaggacaagaagtcccccctgaacctgtcctccgagctgcaggacg |
| | | agatcggcaccgccttctccctgttcaagaccgacgaggacatcaccggccggctgaaggaccgggtgcagcccgagatcctg |
| | | gaggccctgctgaagcacatctccttcgacaagttcgtgcagatctccctgaaggccctgcggcggatcgtgcccctgatgga |
| | | gcagggcaagcggtacgacgaggcctgcgccgagatctacggcgaccactacggcaagaagaacaccgaggagaagatctacc |
| | | tgccccccatccccgccgacgagatccggaaccccgtggtgctgcgggccctgtcccaggcccggaaggtgatcaacggcgtg |
| | | gtgcggcggtacggctcccccgcccggatccacatcgagaccgcccgggaggtgggcaagtccttcaaggaccggaaggagat |
| | | cgagaagcggcaggaggagaaccggaaggaccgggagaaggccgccgccaagttccgggagtacttccccaacttcgtgggcg |
| | | agcccaagtccaaggacatcctgaagctgcggctgtacgagcagcagcacggcaagtgcctgtactccggcaaggagatcaac |
| | | ctggtgcggctgaacgagaagggctacgtggagatcgaccacgccctgcccttctcccggacctgggacgactccttcaacaa |
| | | caaggtgctggtgctgggctccgagaaccagaacaagggcaaccagaccccctacgagtacttcaacggcaaggacaactccc |
| | | gggagtggcaggagttcaaggcccgggtggagacctcccggttcccccggtccaagaagcagcggatcctgctgcagaagttc |
| | | gacgaggacggcttcaaggagtgcaacctgaacgacacccggtacgtgaaccggttcctgtgccagttcgtggccgaccacat |
| | | cctgctgaccggcaagggcaagcggcgggtgttcgcctccaacggccagatcaccaacctgctgcggggcttctggggcctgc |
| | | ggaaggtgcgggccgagaacgaccggcaccacgccctggacgccgtggtggtggcctgctccaccgtggccatgcagcagaag |
| | | atcacccggttcgtgcggtacaaggagatgaacgccttcgacggcaagaccatcgacaaggagaccggcaaggtgctgcacca |
| | | gaagacccacttcccccagccctgggagttcttcgcccaggaggtgatgatccgggtgttcggcaagcccgacggcaagcccg |
| | | agttcgaggaggccgacacccccgagaagctgcggaccctgctggccgagaagctgtcctcccggcccgaggccgtgcacgag |
| | | tacgtgacccccctgttcgtgtcccgggcccccaaccggaagatgtccggcgcccacaaggacaccctgcggtccgccaagcg |
| | | gttcgtgaagcacaacgagaagatctccgtgaagcgggtgtggctgaccgagatcaagctggccgacctggagaacatggtga |
| | | actacaagaacggccgggagatcgagctgtacgaggccctgaaggcccggctggaggcctacggcggcaacgccaagcaggcc |
| | | ttcgaccccaaggacaaccccttctacaagaagggcggccagctggtgaaggccgtgcgggtggagaagacccaggagtccgg |
| | | cgtgctgctgaacaagaagaacgcctacaccatcgccgacaacggcgacatggtgcgggtggacgtgttctgcaaggtggaca |
| | | agaagggcaagaaccagtacttcatcgtgcccatctacgcctggcaggtggccgagaacatcctgcccgacatcgactgcaag |
| | | ggctaccggatcgacgactcctacaccttctgcttctccctgcacaagtacgacctgatcgccttccagaaggacgagaagtc |
| | | caaggtggagttcgcctactacatcaactgcgactcctccaacggccggttctacctggcctggcacgacaagggctccaagg |
| | | agcagcagttccggatctccacccagaacctggtgctgatccagaagtaccaggtgaacgagctgggcaaggagatccggccc |
| | | tgccggctgaagaagcggccccccgtgcggtagctagcaccagcctcaagaacacccgaatggagtctctaagctacataata |
| | | ccaacttacactttacaaaatgttgtcccccaaaatgtagccattcgtatctgctcctaataaaaagaaagtttcttcacatt |
| | | ctctcgagAAAAAAAAAAAATGGAAAAAAAAAAAACGGAAAAAAAAAAAAGGTAAAAAAAAAAAATATAAAAAAAAAAAACAT |
| | | AAAAAAAAAAAACGAAAAAAAAAAAACGTAAAAAAAAAAAACTCAAAAAAAAAAAGATAAAAAAAAAAAACCTAAAAAAAAAA |
| | | AATGTAAAAAAAAAAAAGGGAAAAAAAAAAAACGCAAAAAAAAAAAACACAAAAAAAAAAAATGCAAAAAAAAAAAATCGAAA |
| | | AAAAAAAAATCTAAAAAAAAAAAACGAAAAAAAAAAAACCCAAAAAAAAAAAAGACAAAAAAAAAAAATAGAAAAAAAAAAAG |
| | | TTAAAAAAAAAAAACTGAAAAAAAAAAAATTTAAAAAAAAAAAAT |
| mRNA M | 23 | GGGAAGCUCAGAAUAAACGCUCAACUUUGGCCGGAUCUGCCACCAUGGACGGCUCCGGCGGCGGCUCCCCCAAGAAGAAGCGG |
| encoding | | AAGGUGGGCGGCUCCGGCGGCGGCGCCGCCUUCAAGCCCAACCCCAUCAACUACAUCCUGGGCCUGGACAUCGGCAUCGCCUC |
| Nme2Cas9 | | CGUGGGCUGGGCCAUGGUGGAGAUCGACGAGGAGGAGAACCCCAUCCGGCUGAUCGACCUGGGCGUGCGGGUGUUCGAGcGGG |
| with | | CCGAGGUGCCCAAGACCGGCGACUCCCUGGCCAUGGCCCGGCGGCUGGCCCGGUCCGUGCGGCGGCUGACCCGGCGGCGGGCC |
| HiBiT tag | | CACCGGCUGCUGCGGGCCCGGCGGCUGCUGAAGCGGGAGGGCGUGCUGCAGGCCGCCGACUUCGACGAGAACGGCCUGAUCAA |
| | | GUCCCUGCCCAACACCCCCUGGCAGCUGCGGGCCGCCGCCCUGGACCGGAAGCUGACCCCCCUGGAGUGGUCCGCCGUGCUGC |
| | | UGCACCUGAUCAAGCACCGGGGCUACCUGUCCCAGCGGAAGAACGAGGGCGAGACCGCCGACAAGGAGCUGGGCGCCCUGCUG |
| | | AAGGGCGUGGCCAACAACGCCCACGCCCUGCAGACCGGCGACUUCCGGACCCCCGCCGAGCUGGCCCUGAACAAGUUCGAGAA |
| | | GGAGUCCGGCCACAUCCGGAACCAGCGGGGCGACUACUCCCACACCUUCUCCCGGAAGGACCUGCAGGCCGAGCUGAUCCUGC |
| | | UGUUCGAGAAGCAGAAGGAGUUCGGCAACCCCCACGUGUCCGGCGGCCUGAAGGAGGGCAUCGAGACCCUGCUGAUGACCCAG |
| | | CGGCCCGCCCUGUCCGGCGACGCCGUGCAGAAGAUGCUGGGCCACUGCACCUUCGAGCCCGCCGAGCCCAAGGCCGCCAAGAA |
| | | CACCUACACCGCCGAGCGGUUCAUCUGGCUGACCAAGCUGAACAACCUGCGGAUCCUGGAGCAGGGCUCCGAGCGGCCCCUGA |
| | | CCGACACCGAGCGGGCCACCCUGAUGGACGAGCCCUACCGGAAGUCCAAGCUGACCUACGCCCAGGCCCGGAAGCUGCUGGGC |
| | | CUGGAGGACACCGCCUUCUUCAAGGGCCUGCGGUACGGCAAGGACAACGCCGAGGCCUCCACCCUGAUGGAGAUGAAGGCCUA |
| | | CCACGCCAUCUCCCGGGCCCUGGAGAAGGAGGGCCUGAAGGACAAGAAGUCCCCCCUGAACCUGUCCUCCGAGCUGCAGGACG |
| | | AGAUCGGCACCGCCUUCUCCCUGUUCAAGACCGACGAGGACAUCACCGGCCGGCUGAAGGACCGGGUGCAGCCCGAGAUCCUG |
| | | GAGGCCCUGCUGAAGCACAUCUCCUUCGACAAGUUCGUGCAGAUCUCCCUGAAGGCCCUGCGGCGGAUCGUGCCCCUGAUGGA |
| | | GCAGGGCAAGCGGUACGACGAGGCCUGCGCCGAGAUCUACGGCGACCACUACGGCAAGAAGAACACCGAGGAGAAGAUCUACC |
| | | UGCCCCCCAUCCCCGCCGACGAGAUCCGGAACCCCGUGGUGCUGCGGGCCCUGUCCCAGGCCCGGAAGGUGAUCAACGGCGUG |
| | | GUGCGGCGGUACGGCUCCCCCGCCCGGAUCCACAUCGAGACCGCCCGGGAGGUGGGCAAGUCCUUCAAGGACCGGAAGGAGAU |
| | | CGAGAAGCGGCAGGAGGAGAACCGGAAGGACCGGGAGAAGGCCGCCGCCAAGUUCCGGGAGUACUUCCCCAACUUCGUGGGCG |
| | | AGCCCAAGUCCAAGGACAUCCUGAAGCUGCGGCUGUACGAGCAGCAGCACGGCAAGUGCCUGUACUCCGGCAAGGAGAUCAAC |
| | | CUGGUGCGGCUGAACGAGAAGGGCUACGUGGAGAUCGACCACGCCCUGCCCUUCUCCCGGACCUGGGACGACUCCUUCAACAA |
| | | CAAGGUGCUGGUGCUGGGCUCCGAGAACCAGAACAAGGGCAACCAGACCCCCUACGAGUACUUCAACGGCAAGGACAACUCCC |
| | | GGGAGUGGCAGGAGUUCAAGGCCCGGGUGGAGACCUCCCGGUUCCCCCGGUCCAAGAAGCAGCGGAUCCUGCUGCAGAAGUUC |
| | | GACGAGGACGGCUUCAAGGAGUGCAACCUGAACGACACCCGGUACGUGAACCGGUUCCUGUGCCAGUUCGUGGCCGACCACAU |
| | | CCUGCUGACCGGCAAGGGCAAGCGGCGGGUGUUCGCCUCCAACGGCCAGAUCACCAACCUGCUGCGGGGCUUCUGGGGCCUGC |
| | | GGAAGGUGCGGGCCGAGAACGACCGGCACCACGCCCUGGACGCCGUGGUGGUGGCCUGCUCCACCGUGGCCAUGCAGCAGAAG |
| | | AUCACCCGGUUCGUGCGGUACAAGGAGAUGAACGCCUUCGACGGCAAGACCAUCGACAAGGAGACCGGCAAGGUGCUGCACCA |
| | | GAAGACCCACUUCCCCCAGCCCUGGGAGUUCUUCGCCCAGGAGGUGAUGAUCCGGGUGUUCGGCAAGCCCGACGGCAAGCCCG |
| | | AGUUCGAGGAGGCCGACACCCCCGAGAAGCUGCGGACCCUGCUGGCCGAGAAGCUGUCCUCCCGGCCCGAGGCCGUGCACGAG |
| | | UACGUGACCCCCCUGUUCGUGUCCCGGGCCCCCAACCGGAAGAUGUCCGGCGCCCACAAGGACACCCUGCGGUCCGCCAAGCG |
| | | GUUCGUGAAGCACAACGAGAAGAUCUCCGUGAAGCGGGUGUGGCUGACCGAGAUCAAGCUGGCCGACCUGGAGAACAUGGUGA |
| | | ACUACAAGAACGGCCGGGAGAUCGAGCUGUACGAGGCCCUGAAGGCCCGGCUGGAGGCCUACGGCGGCAACGCCAAGCAGGCC |
| | | UUCGACCCCAAGGACAACCCCUUCUACAAGAAGGGCGGCCAGCUGGUGAAGGCCGUGCGGGUGGAGAAGACCCAGGAGUCCGG |
| | | CGUGCUGCUGAACAAGAAGAACGCCUACACCAUCGCCGACAACGGCGACAUGGUGCGGGUGGACGUGUUCUGCAAGGUGGACA |
| | | AGAAGGGCAAGAACCAGUACUUCAUCGUGCCCAUCUACGCCUGGCAGGUGGCCGAGAACAUCCUGCCCGACAUCGACUGCAAG |
| | | GGCUACCGGAUCGACGACUCCUACACCUUCUGCUUCUCCCUGCACAAGUACGACCUGAUCGCCUUCCAGAAGGACGAGAAGUC |
| | | CAAGGUGGAGUUCGCCUACUACAUCAACUGCGACUCCUCCAACGGCCGGUUCUACCUGGCCUGGCACGACAAGGGCUCCAAGG |
| | | AGCAGCAGUUCCGGAUCUCCACCCAGAACCUGGUGCUGAUCCAGAAGUACCAGGUGAACGAGCUGGGCAAGGAGAUCCGGCCC |
| | | UGCCGGCUGAAGAAGCGGCCCCCCGUGCGGUCCGAGUCCGCCACCCCCGAGUCCGUGUCCGGCUGGCGGCUGUUCAAGAAGAU |
| | | CUCCUAGCUAGCACCAGCCUCAAGAACACCCGAAUGGAGUCUCUAAGCUACAUAAUACCAACUUACACUUUACAAAAUGUUGU |
| | | CCCCCAAAAUGUAGCCAUUCGUAUCUGCUCCUAAUAAAAAGAAAGUUUCUUCACAUUCUCUCGAGAAAAAAAAAAAAUGGAAA |
| | | AAAAAAAAACGGAAAAAAAAAAAAGGUAAAAAAAAAAAAUAUAAAAAAAAAAAACAUAAAAAAAAAAAACGAAAAAAAAAAAA |
| | | CGUAAAAAAAAAAAACUCAAAAAAAAAAAAGAUAAAAAAAAAAAACCUAAAAAAAAAAAAUGUAAAAAAAAAAAAGGGAAAAA |
| | | AAAAAAACGCAAAAAAAAAAAACACAAAAAAAAAAAAUGCAAAAAAAAAAAAUCGAAAAAAAAAAAAUCUAAAAAAAAAAAAC |
| | | GAAAAAAAAAAAACCCAAAAAAAAAAAAGACAAAAAAAAAAAAUAGAAAAAAAAAAAAGUUAAAAAAAAAAAACUGAAAAAAA |
| | | AAAAAUUUAAAAAAAAAAAAUCUAG |
| mRNA N | 24 | GGGAAGCUCAGAAUAAACGCUCAACUUUGGCCGGAUCUGCCACCAUGGACGGCUCCGGCGGCGGCUCCCCCAAGAAGAAGCGG |
| encoding | | AAGGUGGGCGGCUCCGGCGGCGGCGCCGCCUUCAAGCCCAACCCCAUCAACUACAUCCUGGGCCUGGACAUCGGCAUCGCCUC |
| Nme2Cas9 | | CGUGGGCUGGGCCAUGGUGGAGAUCGACGAGGAGGAGAACCCCAUCCGGCUGAUCGACCUGGGCGUGCGGGUGUUCGAGCGGG |
| | | CCGAGGUGCCCAAGACCGGCGACUCCCUGGCCAUGGCCCGGCGGCUGGCCCGGUCCGUGCGGCGGCUGACCCGGCGGCGGGCC |
| | | CACCGGCUGCUGCGGGCCCGGCGGCUGCUGAAGCGGGAGGGCGUGCUGCAGGCCGCCGACUUCGACGAGAACGGCCUGAUCAA |
| | | GUCCCUGCCCAACACCCCCUGGCAGCUGCGGGCCGCCGCCCUGGACCGGAAGCUGACCCCCCUGGAGUGGUCCGCCGUGCUGC |
| | | UGCACCUGAUCAAGCACCGGGGCUACCUGUCCCAGCGGAAGAACGAGGGCGAGACCGCCGACAAGGAGCUGGGCGCCCUGCUG |
| | | AAGGGCGUGGCCAACAACGCCCACGCCCUGCAGACCGGCGACUUCCGGACCCCCGCCGAGCUGGCCCUGAACAAGUUCGAGAA |
| | | GGAGUCCGGCCACAUCCGGAACCAGCGGGGCGACUACUCCCACACCUUCUCCCGGAAGGACCUGCAGGCCGAGCUGAUCCUGC |
| | | UGUUCGAGAAGCAGAAGGAGUUCGGCAACCCCCACGUGUCCGGCGGCCUGAAGGAGGGCAUCGAGACCCUGCUGAUGACCCAG |
| | | CGGCCCGCCCUGUCCGGCGACGCCGUGCAGAAGAUGCUGGGCCACUGCACCUUCGAGCCCGCCGAGCCCAAGGCCGCCAAGAA |
| | | CACCUACACCGCCGAGCGGUUCAUCUGGCUGACCAAGCUGAACAACCUGCGGAUCCUGGAGCAGGGCUCCGAGCGGCCCCUGA |
| | | CCGACACCGAGCGGGCCACCCUGAUGGACGAGCCCUACCGGAAGUCCAAGCUGACCUACGCCCAGGCCCGGAAGCUGCUGGGC |
| | | CUGGAGGACACCGCCUUCUUCAAGGGCCUGCGGUACGGCAAGGACAACGCCGAGGCCUCCACCCUGAUGGAGAUGAAGGCCUA |
| | | CCACGCCAUCUCCCGGGCCCUGGAGAAGGAGGGCCUGAAGGACAAGAAGUCCCCCCUGAACCUGUCCUCCGAGCUGCAGGACG |
| | | AGAUCGGCACCGCCUUCUCCCUGUUCAAGACCGACGAGGACAUCACCGGCCGGCUGAAGGACCGGGUGCAGCCCGAGAUCCUG |
| | | GAGGCCCUGCUGAAGCACAUCUCCUUCGACAAGUUCGUGCAGAUCUCCCUGAAGGCCCUGCGGCGGAUCGUGCCCCUGAUGGA |
| | | GCAGGGCAAGCGGUACGACGAGGCCUGCGCCGAGAUCUACGGCGACCACUACGGCAAGAAGAACACCGAGGAGAAGAUCUACC |
| | | UGCCCCCCAUCCCCGCCGACGAGAUCCGGAACCCCGUGGUGCUGCGGGCCCUGUCCCAGGCCCGGAAGGUGAUCAACGGCGUG |
| | | GUGCGGCGGUACGGCUCCCCCGCCCGGAUCCACAUCGAGACCGCCCGGGAGGUGGGCAAGUCCUUCAAGGACCGGAAGGAGAU |
| | | CGAGAAGCGGCAGGAGGAGAACCGGAAGGACCGGGAGAAGGCCGCCGCCAAGUUCCGGGAGUACUUCCCCAACUUCGUGGGCG |
| | | AGCCCAAGUCCAAGGACAUCCUGAAGCUGCGGCUGUACGAGCAGCAGCACGGCAAGUGCCUGUACUCCGGCAAGGAGAUCAAC |
| | | CUGGUGCGGCUGAACGAGAAGGGCUACGUGGAGAUCGACCACGCCCUGCCCUUCUCCCGGACCUGGGACGACUCCUUCAACAA |
| | | CAAGGUGCUGGUGCUGGGCUCCGAGAACCAGAACAAGGGCAACCAGACCCCCUACGAGUACUUCAACGGCAAGGACAACUCCC |
| | | GGGAGUGGCAGGAGUUCAAGGCCCGGGUGGAGACCUCCCGGUUCCCCCGGUCCAAGAAGCAGCGGAUCCUGCUGCAGAAGUUC |
| | | GACGAGGACGGCUUCAAGGAGUGCAACCUGAACGACACCCGGUACGUGAACCGGUUCCUGUGCCAGUUCGUGGCCGACCACAU |
| | | CCUGCUGACCGGCAAGGGCAAGCGGCGGGUGUUCGCCUCCAACGGCCAGAUCACCAACCUGCUGCGGGGCUUCUGGGGCCUGC |
| | | GGAAGGUGCGGGCCGAGAACGACCGGCACCACGCCCUGGACGCCGUGGUGGUGGCCUGCUCCACCGUGGCCAUGCAGCAGAAG |
| | | AUCACCCGGUUCGUGCGGUACAAGGAGAUGAACGCCUUCGACGGCAAGACCAUCGACAAGGAGACCGGCAAGGUGCUGCACCA |
| | | GAAGACCCACUUCCCCCAGCCCUGGGAGUUCUUCGCCCAGGAGGUGAUGAUCCGGGUGUUCGGCAAGCCCGACGGCAAGCCCG |
| | | AGUUCGAGGAGGCCGACACCCCCGAGAAGCUGCGGACCCUGCUGGCCGAGAAGCUGUCCUCCCGGCCCGAGGCCGUGCACGAG |
| | | UACGUGACCCCCCUGUUCGUGUCCCGGGCCCCCAACCGGAAGAUGUCCGGCGCCCACAAGGACACCCUGCGGUCCGCCAAGCG |
| | | GUUCGUGAAGCACAACGAGAAGAUCUCCGUGAAGCGGGUGUGGCUGACCGAGAUCAAGCUGGCCGACCUGGAGAACAUGGUGA |
| | | ACUACAAGAACGGCCGGGAGAUCGAGCUGUACGAGGCCCUGAAGGCCCGGCUGGAGGCCUACGGCGGCAACGCCAAGCAGGCC |
| | | UUCGACCCCAAGGACAACCCCUUCUACAAGAAGGGCGGCCAGCUGGUGAAGGCCGUGCGGGUGGAGAAGACCCAGGAGUCCGG |
| | | CGUGCUGCUGAACAAGAAGAACGCCUACACCAUCGCCGACAACGGCGACAUGGUGCGGGUGGACGUGUUCUGCAAGGUGGACA |
| | | AGAAGGGCAAGAACCAGUACUUCAUCGUGCCCAUCUACGCCUGGCAGGUGGCCGAGAACAUCCUGCCCGACAUCGACUGCAAG |
| | | GGCUACCGGAUCGACGACUCCUACACCUUCUGCUUCUCCCUGCACAAGUACGACCUGAUCGCCUUCCAGAAGGACGAGAAGUC |
| | | CAAGGUGGAGUUCGCCUACUACAUCAACUGCGACUCCUCCAACGGCCGGUUCUACCUGGCCUGGCACGACAAGGGCUCCAAGG |
| | | AGCAGCAGUUCCGGAUCUCCACCCAGAACCUGGUGCUGAUCCAGAAGUACCAGGUGAACGAGCUGGGCAAGGAGAUCCGGCCC |
| | | UGCCGGCUGAAGAAGCGGCCCCCCGUGCGGUCCGGAAAGCGGACCGCCGACGGCUCCGGAGGAGGAAGCCCCGCCGCCAAGAA |
| | | GAAGAAGCUGGACUAGCUAGCACCAGCCUCAAGAACACCCGAAUGGAGUCUCUAAGCUACAUAAUACCAACUUACACUUUACA |
| | | AAAUGUUGUCCCCCAAAAUGUAGCCAUUCGUAUCUGCUCCUAAUAAAAAGAAAGUUUCUUCACAUUCUCUCGAGAAAAAAAAA |
| | | AAAUGGAAAAAAAAAAAACGGAAAAAAAAAAAAGGUAAAAAAAAAAAAUAUAAAAAAAAAAAACAUAAAAAAAAAAAACGAAA |
| | | AAAAAAAAACGUAAAAAAAAAAAACUCAAAAAAAAAAAGAUAAAAAAAAAAAACCUAAAAAAAAAAAAUGUAAAAAAAAAAAA |
| | | GGGAAAAAAAAAAAACGCAAAAAAAAAAAACACAAAAAAAAAAAAUGCAAAAAAAAAAAAUCGAAAAAAAAAAAAUCUAAAAA |
| | | AAAAAAACGAAAAAAAAAAAACCCAAAAAAAAAAAAGACAAAAAAAAAAAAUAGAAAAAAAAAAAGUUAAAAAAAAAAAACUG |
| | | AAAAAAAAAAAAUUUAAAAAAAAAAAAUCUAG |
| mRNA O | 25 | GGGAAGCUCAGAAUAAACGCUCAACUUUGGCCGGAUCUGCCACCAUGGACGGCUCCGGCGGCGGCUCCCCCAAGAAGAAGCGG |
| encoding | | AAGGUGGAGGACAAGCGGCCCGCCGCCACCAAGAAGGCCGGCCAGGCCAAGAAGAAGAAGGGCGGCUCCGGCGGCGGCGCCGC |
| Nme2Cas9 | | CUUCAAGCCCAACCCCAUCAACUACAUCCUGGGCCUGGACAUCGGCAUCGCCUCCGUGGGCUGGGCCAUGGUGGAGAUCGACG |
| | | AGGAGGAGAACCCCAUCCGGCUGAUCGACCUGGGCGUGCGGGUGUUCGAGCGGGCCGAGGUGCCCAAGACCGGCGACUCCCUG |
| | | GCCAUGGCCCGGCGGCUGGCCCGGUCCGUGCGGCGGCUGACCCGGCGGCGGGCCCACCGGCUGCUGCGGGCCCGGCGGCUGCU |
| | | GAAGCGGGAGGGCGUGCUGCAGGCCGCCGACUUCGACGAGAACGGCCUGAUCAAGUCCCUGCCCAACACCCCCUGGCAGCUGC |
| | | GGGCCGCCGCCCUGGACCGGAAGCUGACCCCCCUGGAGUGGUCCGCCGUGCUGCUGCACCUGAUCAAGCACCGGGGCUACCUG |
| | | UCCCAGCGGAAGAACGAGGGCGAGACCGCCGACAAGGAGCUGGGCGCCCUGCUGAAGGGCGUGGCCAACAACGCCCACGCCCU |
| | | GCAGACCGGCGACUUCCGGACCCCCGCCGAGCUGGCCCUGAACAAGUUCGAGAAGGAGUCCGGCCACAUCCGGAACCAGCGGG |
| | | GCGACUACUCCCACACCUUCUCCCGGAAGGACCUGCAGGCCGAGCUGAUCCUGCUGUUCGAGAAGCAGAAGGAGUUCGGCAAC |
| | | CCCCACGUGUCCGGCGGCCUGAAGGAGGGCAUCGAGACCCUGCUGAUGACCCAGCGGCCCGCCCUGUCCGGCGACGCCGUGCA |
| | | GAAGAUGCUGGGCCACUGCACCUUCGAGCCCGCCGAGCCCAAGGCCGCCAAGAACACCUACACCGCCGAGCGGUUCAUCUGGC |
| | | UGACCAAGCUGAACAACCUGCGGAUCCUGGAGCAGGGCUCCGAGCGGCCCCUGACCGACACCGAGCGGGCCACCCUGAUGGAC |
| | | GAGCCCUACCGGAAGUCCAAGCUGACCUACGCCCAGGCCCGGAAGCUGCUGGGCCUGGAGGACACCGCCUUCUUCAAGGGCCU |
| | | GCGGUACGGCAAGGACAACGCCGAGGCCUCCACCCUGAUGGAGAUGAAGGCCUACCACGCCAUCUCCCGGGCCCUGGAGAAGG |
| | | AGGGCCUGAAGGACAAGAAGUCCCCCCUGAACCUGUCCUCCGAGCUGCAGGACGAGAUCGGCACCGCCUUCUCCCUGUUCAAG |
| | | ACCGACGAGGACAUCACCGGCCGGCUGAAGGACCGGGUGCAGCCCGAGAUCCUGGAGGCCCUGCUGAAGCACAUCUCCUUCGA |
| | | CAAGUUCGUGCAGAUCUCCCUGAAGGCCCUGCGGCGGAUCGUGCCCCUGAUGGAGCAGGGCAAGCGGUACGACGAGGCCUGCG |
| | | CCGAGAUCUACGGCGACCACUACGGCAAGAAGAACACCGAGGAGAAGAUCUACCUGCCCCCCAUCCCCGCCGACGAGAUCCGG |
| | | AACCCCGUGGUGCUGCGGGCCCUGUCCCAGGCCCGGAAGGUGAUCAACGGCGUGGUGCGGCGGUACGGCUCCCCCGCCCGGAU |
| | | CCACAUCGAGACCGCCCGGGAGGUGGGCAAGUCCUUCAAGGACCGGAAGGAGAUCGAGAAGCGGCAGGAGGAGAACCGGAAGG |
| | | ACCGGGAGAAGGCCGCCGCCAAGUUCCGGGAGUACUUCCCCAACUUCGUGGGCGAGCCCAAGUCCAAGGACAUCCUGAAGCUG |
| | | CGGCUGUACGAGCAGCAGCACGGCAAGUGCCUGUACUCCGGCAAGGAGAUCAACCUGGUGCGGCUGAACGAGAAGGGCUACGU |
| | | GGAGAUCGACCACGCCCUGCCCUUCUCCCGGACCUGGGACGACUCCUUCAACAACAAGGUGCUGGUGCUGGGCUCCGAGAACC |
| | | AGAACAAGGGCAACCAGACCCCCUACGAGUACUUCAACGGCAAGGACAACUCCCGGGAGUGGCAGGAGUUCAAGGCCCGGGUG |
| | | GAGACCUCCCGGUUCCCCCGGUCCAAGAAGCAGCGGAUCCUGCUGCAGAAGUUCGACGAGGACGGCUUCAAGGAGUGCAACCU |
| | | GAACGACACCCGGUACGUGAACCGGUUCCUGUGCCAGUUCGUGGCCGACCACAUCCUGCUGACCGGCAAGGGCAAGCGGCGGG |
| | | UGUUCGCCUCCAACGGCCAGAUCACCAACCUGCUGCGGGGCUUCUGGGGCCUGCGGAAGGUGCGGGCCGAGAACGACCGGCAC |
| | | CACGCCCUGGACGCCGUGGUGGUGGCCUGCUCCACCGUGGCCAUGCAGCAGAAGAUCACCCGGUUCGUGCGGUACAAGGAGAU |
| | | GAACGCCUUCGACGGCAAGACCAUCGACAAGGAGACCGGCAAGGUGCUGCACCAGAAGACCCACUUCCCCCAGCCCUGGGAGU |
| | | UCUUCGCCCAGGAGGUGAUGAUCCGGGUGUUCGGCAAGCCCGACGGCAAGCCCGAGUUCGAGGAGGCCGACACCCCCGAGAAG |
| | | CUGCGGACCCUGCUGGCCGAGAAGCUGUCCUCCCGGCCCGAGGCCGUGCACGAGUACGUGACCCCCCUGUUCGUGUCCCGGGC |
| | | CCCCAACCGGAAGAUGUCCGGCGCCCACAAGGACACCCUGCGGUCCGCCAAGCGGUUCGUGAAGCACAACGAGAAGAUCUCCG |
| | | UGAAGCGGGUGUGGCUGACCGAGAUCAAGCUGGCCGACCUGGAGAACAUGGUGAACUACAAGAACGGCCGGGAGAUCGAGCUG |
| | | UACGAGGCCCUGAAGGCCCGGCUGGAGGCCUACGGCGGCAACGCCAAGCAGGCCUUCGACCCCAAGGACAACCCCUUCUACAA |
| | | GAAGGGCGGCCAGCUGGUGAAGGCCGUGCGGGUGGAGAAGACCCAGGAGUCCGGCGUGCUGCUGAACAAGAAGAACGCCUACA |
| | | CCAUCGCCGACAACGGCGACAUGGUGCGGGUGGACGUGUUCUGCAAGGUGGACAAGAAGGGCAAGAACCAGUACUUCAUCGUG |
| | | CCCAUCUACGCCUGGCAGGUGGCCGAGAACAUCCUGCCCGACAUCGACUGCAAGGGCUACCGGAUCGACGACUCCUACACCUU |
| | | CUGCUUCUCCCUGCACAAGUACGACCUGAUCGCCUUCCAGAAGGACGAGAAGUCCAAGGUGGAGUUCGCCUACUACAUCAACU |
| | | GCGACUCCUCCAACGGCCGGUUCUACCUGGCCUGGCACGACAAGGGCUCCAAGGAGCAGCAGUUCCGGAUCUCCACCCAGAAC |
| | | CUGGUGCUGAUCCAGAAGUACCAGGUGAACGAGCUGGGCAAGGAGAUCCGGCCCUGCCGGCUGAAGAAGCGGCCCCCCGUGCG |
| | | GUAGCUAGCACCAGCCUCAAGAACACCCGAAUGGAGUCUCUAAGCUACAUAAUACCAACUUACACUUUACAAAAUGUUGUCCC |
| | | CCAAAAUGUAGCCAUUCGUAUCUGCUCCUAAUAAAAAGAAAGUUUCUUCACAUUCUCUCGAGAAAAAAAAAAAAUGGAAAAAA |
| | | AAAAAACGGAAAAAAAAAAAAGGUAAAAAAAAAAAAUAUAAAAAAAAAAAACAUAAAAAAAAAAAACGAAAAAAAAAAAACGU |
| | | AAAAAAAAAAAACUCAAAAAAAAAAAGAUAAAAAAAAAAAACCUAAAAAAAAAAAAUGUAAAAAAAAAAAAGGGAAAAAAAAA |
| | | AAACGCAAAAAAAAAAAACACAAAAAAAAAAAAUGCAAAAAAAAAAAAUCGAAAAAAAAAAAAUCUAAAAAAAAAAAACGAAA |
| | | AAAAAAAAACCCAAAAAAAAAAAAGACAAAAAAAAAAAAUAGAAAAAAAAAAAGUUAAAAAAAAAAAACUGAAAAAAAAAAAA |
| | | UUUAAAAAAAAAAAAUCUAG |
| mRNA P | 26 | GGGAAGCUCAGAAUAAACGCUCAACUUUGGCCGGAUCUGCCACCAUGGACGGCUCCGGCGGCGGCUCCCCCAAGAAGAAGCGG |
| encoding | | AAGGUGGAGGACAAGCGGCCCGCCGCCACCAAGAAGGCCGGCCAGGCCAAGAAGAAGAAGGGCGGCUCCGGCGGCGGCGCCGC |
| Nme2Cas9 | | CUUCAAGCCCAACCCCAUCAACUACAUCCUGGGCCUGGACAUCGGCAUCGCCUCCGUGGGCUGGGCCAUGGUGGAGAUCGACG |
| with | | AGGAGGAGAACCCCAUCCGGCUGAUCGACCUGGGCGUGCGGGUGUUCGAGCGGGCCGAGGUGCCCAAGACCGGCGACUCCCUG |
| HiBiT tag | | GCCAUGGCCCGGCGGCUGGCCCGGUCCGUGCGGCGGCUGACCCGGCGGCGGGCCCACCGGCUGCUGCGGGCCCGGCGGCUGCU |
| | | GAAGCGGGAGGGCGUGCUGCAGGCCGCCGACUUCGACGAGAACGGCCUGAUCAAGUCCCUGCCCAACACCCCCUGGCAGCUGC |
| | | GGGCCGCCGCCCUGGACCGGAAGCUGACCCCCCUGGAGUGGUCCGCCGUGCUGCUGCACCUGAUCAAGCACCGGGGCUACCUG |
| | | UCCCAGCGGAAGAACGAGGGCGAGACCGCCGACAAGGAGCUGGGCGCCCUGCUGAAGGGCGUGGCCAACAACGCCCACGCCCU |
| | | GCAGACCGGCGACUUCCGGACCCCCGCCGAGCUGGCCCUGAACAAGUUCGAGAAGGAGUCCGGCCACAUCCGGAACCAGCGGG |
| | | GCGACUACUCCCACACCUUCUCCCGGAAGGACCUGCAGGCCGAGCUGAUCCUGCUGUUCGAGAAGCAGAAGGAGUUCGGCAAC |
| | | CCCCACGUGUCCGGCGGCCUGAAGGAGGGCAUCGAGACCCUGCUGAUGACCCAGCGGCCCGCCCUGUCCGGCGACGCCGUGCA |
| | | GAAGAUGCUGGGCCACUGCACCUUCGAGCCCGCCGAGCCCAAGGCCGCCAAGAACACCUACACCGCCGAGCGGUUCAUCUGGC |
| | | UGACCAAGCUGAACAACCUGCGGAUCCUGGAGCAGGGCUCCGAGCGGCCCCUGACCGACACCGAGCGGGCCACCCUGAUGGAC |
| | | GAGCCCUACCGGAAGUCCAAGCUGACCUACGCCCAGGCCCGGAAGCUGCUGGGCCUGGAGGACACCGCCUUCUUCAAGGGCCU |
| | | GCGGUACGGCAAGGACAACGCCGAGGCCUCCACCCUGAUGGAGAUGAAGGCCUACCACGCCAUCUCCCGGGCCCUGGAGAAGG |
| | | AGGGCCUGAAGGACAAGAAGUCCCCCCUGAACCUGUCCUCCGAGCUGCAGGACGAGAUCGGCACCGCCUUCUCCCUGUUCAAG |
| | | ACCGACGAGGACAUCACCGGCCGGCUGAAGGACCGGGUGCAGCCCGAGAUCCUGGAGGCCCUGCUGAAGCACAUCUCCUUCGA |
| | | CAAGUUCGUGCAGAUCUCCCUGAAGGCCCUGCGGCGGAUCGUGCCCCUGAUGGAGCAGGGCAAGCGGUACGACGAGGCCUGCG |
| | | CCGAGAUCUACGGCGACCACUACGGCAAGAAGAACACCGAGGAGAAGAUCUACCUGCCCCCCAUCCCCGCCGACGAGAUCCGG |
| | | AACCCCGUGGUGCUGCGGGCCCUGUCCCAGGCCCGGAAGGUGAUCAACGGCGUGGUGCGGCGGUACGGCUCCCCCGCCCGGAU |
| | | CCACAUCGAGACCGCCCGGGAGGUGGGCAAGUCCUUCAAGGACCGGAAGGAGAUCGAGAAGCGGCAGGAGGAGAACCGGAAGG |
| | | ACCGGGAGAAGGCCGCCGCCAAGUUCCGGGAGUACUUCCCCAACUUCGUGGGCGAGCCCAAGUCCAAGGACAUCCUGAAGCUG |
| | | CGGCUGUACGAGCAGCAGCACGGCAAGUGCCUGUACUCCGGCAAGGAGAUCAACCUGGUGCGGCUGAACGAGAAGGGCUACGU |
| | | GGAGAUCGACCACGCCCUGCCCUUCUCCCGGACCUGGGACGACUCCUUCAACAACAAGGUGCUGGUGCUGGGCUCCGAGAACC |
| | | AGAACAAGGGCAACCAGACCCCCUACGAGUACUUCAACGGCAAGGACAACUCCCGGGAGUGGCAGGAGUUCAAGGCCCGGGUG |
| | | GAGACCUCCCGGUUCCCCCGGUCCAAGAAGCAGCGGAUCCUGCUGCAGAAGUUCGACGAGGACGGCUUCAAGGAGUGCAACCU |
| | | GAACGACACCCGGUACGUGAACCGGUUCCUGUGCCAGUUCGUGGCCGACCACAUCCUGCUGACCGGCAAGGGCAAGCGGCGGG |
| | | UGUUCGCCUCCAACGGCCAGAUCACCAACCUGCUGCGGGGCUUCUGGGGCCUGCGGAAGGUGCGGGCCGAGAACGACCGGCAC |
| | | CACGCCCUGGACGCCGUGGUGGUGGCCUGCUCCACCGUGGCCAUGCAGCAGAAGAUCACCCGGUUCGUGCGGUACAAGGAGAU |
| | | GAACGCCUUCGACGGCAAGACCAUCGACAAGGAGACCGGCAAGGUGCUGCACCAGAAGACCCACUUCCCCCAGCCCUGGGAGU |
| | | UCUUCGCCCAGGAGGUGAUGAUCCGGGUGUUCGGCAAGCCCGACGGCAAGCCCGAGUUCGAGGAGGCCGACACCCCCGAGAAG |
| | | CUGCGGACCCUGCUGGCCGAGAAGCUGUCCUCCCGGCCCGAGGCCGUGCACGAGUACGUGACCCCCCUGUUCGUGUCCCGGGC |
| | | CCCCAACCGGAAGAUGUCCGGCGCCCACAAGGACACCCUGCGGUCCGCCAAGCGGUUCGUGAAGCACAACGAGAAGAUCUCCG |
| | | UGAAGCGGGUGUGGCUGACCGAGAUCAAGCUGGCCGACCUGGAGAACAUGGUGAACUACAAGAACGGCCGGGAGAUCGAGCUG |
| | | UACGAGGCCCUGAAGGCCCGGCUGGAGGCCUACGGCGGCAACGCCAAGCAGGCCUUCGACCCCAAGGACAACCCCUUCUACAA |
| | | GAAGGGCGGCCAGCUGGUGAAGGCCGUGCGGGUGGAGAAGACCCAGGAGUCCGGCGUGCUGCUGAACAAGAAGAACGCCUACA |
| | | CCAUCGCCGACAACGGCGACAUGGUGCGGGUGGACGUGUUCUGCAAGGUGGACAAGAAGGGCAAGAACCAGUACUUCAUCGUG |
| | | CCCAUCUACGCCUGGCAGGUGGCCGAGAACAUCCUGCCCGACAUCGACUGCAAGGGCUACCGGAUCGACGACUCCUACACCUU |
| | | CUGCUUCUCCCUGCACAAGUACGACCUGAUCGCCUUCCAGAAGGACGAGAAGUCCAAGGUGGAGUUCGCCUACUACAUCAACU |
| | | GCGACUCCUCCAACGGCCGGUUCUACCUGGCCUGGCACGACAAGGGCUCCAAGGAGCAGCAGUUCCGGAUCUCCACCCAGAAC |
| | | CUGGUGCUGAUCCAGAAGUACCAGGUGAACGAGCUGGGCAAGGAGAUCCGGCCCUGCCGGCUGAAGAAGCGGCCCCCCGUGCG |
| | | GUCCGAGUCCGCCACCCCCGAGUCCGUGUCCGGCUGGCGGCUGUUCAAGAAGAUCUCCUAGCUAGCACCAGCCUCAAGAACAC |
| | | CCGAAUGGAGUCUCUAAGCUACAUAAUACCAACUUACACUUUACAAAAUGUUGUCCCCCAAAAUGUAGCCAUUCGUAUCUGCU |
| | | CCUAAUAAAAAGAAAGUUUCUUCACAUUCUCUCGAGAAAAAAAAAAAAUGGAAAAAAAAAAAACGGAAAAAAAAAAAAGGUAA |
| | | AAAAAAAAAAUAUAAAAAAAAAAAACAUAAAAAAAAAAAACGAAAAAAAAAAAACGUAAAAAAAAAAAACUCAAAAAAAAAAA |
| | | AGAUAAAAAAAAAAAACCUAAAAAAAAAAAAUGUAAAAAAAAAAAAGGGAAAAAAAAAAAACGCAAAAAAAAAAAACACAAAA |
| | | AAAAAAAAUGCAAAAAAAAAAAAUCGAAAAAAAAAAAAUCUAAAAAAAAAAAACGAAAAAAAAAAAACCCAAAAAAAAAAAAG |
| | | ACAAAAAAAAAAAAUAGAAAAAAAAAAAAGUUAAAAAAAAAAAACUGAAAAAAAAAAAAUUUAAAAAAAAAAAAUCUAG |
| mRNA Q | 27 | GGGAAGCUCAGAAUAAACGCUCAACUUUGGCCGGAUCUGCCACCAUGGACGGCUCCGGCGGCGGCUCCCCCAAGAAGAAGCGG |
| encoding | | AAGGUGGGCGGCUCCGGCGGCGGCGCCGCCUUCAAGCCCAACCCCAUCAACUACAUCCUGGGCCUGGACAUCGGCAUCGCCUC |
| Nme2Cas9 | | CGUGGGCUGGGCCAUGGUGGAGAUCGACGAGGAGGAGAACCCCAUCCGGCUGAUCGACCUGGGCGUGCGGGUGUUCGAGCGGG |
| | | CCGAGGUGCCCAAGACCGGCGACUCCCUGGCCAUGGCCCGGCGGCUGGCCCGGUCCGUGCGGCGGCUGACCCGGCGGCGGGCC |
| | | CACCGGCUGCUGCGGGCCCGGCGGCUGCUGAAGCGGGAGGGCGUGCUGCAGGCCGCCGACUUCGACGAGAACGGCCUGAUCAA |
| | | GUCCCUGCCCAACACCCCCUGGCAGCUGCGGGCCGCCGCCCUGGACCGGAAGCUGACCCCCCUGGAGUGGUCCGCCGUGCUGC |
| | | UGCACCUGAUCAAGCACCGGGGCUACCUGUCCCAGCGGAAGAACGAGGGCGAGACCGCCGACAAGGAGCUGGGCGCCCUGCUG |
| | | AAGGGCGUGGCCAACAACGCCCACGCCCUGCAGACCGGCGACUUCCGGACCCCCGCCGAGCUGGCCCUGAACAAGUUCGAGAA |
| | | GGAGUCCGGCCACAUCCGGAACCAGCGGGGCGACUACUCCCACACCUUCUCCCGGAAGGACCUGCAGGCCGAGCUGAUCCUGC |
| | | UGUUCGAGAAGCAGAAGGAGUUCGGCAACCCCCACGUGUCCGGCGGCCUGAAGGAGGGCAUCGAGACCCUGCUGAUGACCCAG |
| | | CGGCCCGCCCUGUCCGGCGACGCCGUGCAGAAGAUGCUGGGCCACUGCACCUUCGAGCCCGCCGAGCCCAAGGCCGCCAAGAA |
| | | CACCUACACCGCCGAGCGGUUCAUCUGGCUGACCAAGCUGAACAACCUGCGGAUCCUGGAGCAGGGCUCCGAGCGGCCCCUGA |
| | | CCGACACCGAGCGGGCCACCCUGAUGGACGAGCCCUACCGGAAGUCCAAGCUGACCUACGCCCAGGCCCGGAAGCUGCUGGGC |
| | | CUGGAGGACACCGCCUUCUUCAAGGGCCUGCGGUACGGCAAGGACAACGCCGAGGCCUCCACCCUGAUGGAGAUGAAGGCCUA |
| | | CCACGCCAUCUCCCGGGCCCUGGAGAAGGAGGGCCUGAAGGACAAGAAGUCCCCCCUGAACCUGUCCUCCGAGCUGCAGGACG |
| | | AGAUCGGCACCGCCUUCUCCCUGUUCAAGACCGACGAGGACAUCACCGGCCGGCUGAAGGACCGGGUGCAGCCCGAGAUCCUG |
| | | GAGGCCCUGCUGAAGCACAUCUCCUUCGACAAGUUCGUGCAGAUCUCCCUGAAGGCCCUGCGGCGGAUCGUGCCCCUGAUGGA |
| | | GCAGGGCAAGCGGUACGACGAGGCCUGCGCCGAGAUCUACGGCGACCACUACGGCAAGAAGAACACCGAGGAGAAGAUCUACC |
| | | UGCCCCCCAUCCCCGCCGACGAGAUCCGGAACCCCGUGGUGCUGCGGGCCCUGUCCCAGGCCCGGAAGGUGAUCAACGGCGUG |
| | | GUGCGGCGGUACGGCUCCCCCGCCCGGAUCCACAUCGAGACCGCCCGGGAGGUGGGCAAGUCCUUCAAGGACCGGAAGGAGAU |
| | | CGAGAAGCGGCAGGAGGAGAACCGGAAGGACCGGGAGAAGGCCGCCGCCAAGUUCCGGGAGUACUUCCCCAACUUCGUGGGCG |
| | | AGCCCAAGUCCAAGGACAUCCUGAAGCUGCGGCUGUACGAGCAGCAGCACGGCAAGUGCCUGUACUCCGGCAAGGAGAUCAAC |
| | | CUGGUGCGGCUGAACGAGAAGGGCUACGUGGAGAUCGACCACGCCCUGCCCUUCUCCCGGACCUGGGACGACUCCUUCAACAA |
| | | CAAGGUGCUGGUGCUGGGCUCCGAGAACCAGAACAAGGGCAACCAGACCCCCUACGAGUACUUCAACGGCAAGGACAACUCCC |
| | | GGGAGUGGCAGGAGUUCAAGGCCCGGGUGGAGACCUCCCGGUUCCCCCGGUCCAAGAAGCAGCGGAUCCUGCUGCAGAAGUUC |
| | | GACGAGGACGGCUUCAAGGAGUGCAACCUGAACGACACCCGGUACGUGAACCGGUUCCUGUGCCAGUUCGUGGCCGACCACAU |
| | | CCUGCUGACCGGCAAGGGCAAGCGGCGGGUGUUCGCCUCCAACGGCCAGAUCACCAACCUGCUGCGGGGCUUCUGGGGCCUGC |
| | | GGAAGGUGCGGGCCGAGAACGACCGGCACCACGCCCUGGACGCCGUGGUGGUGGCCUGCUCCACCGUGGCCAUGCAGCAGAAG |
| | | AUCACCCGGUUCGUGCGGUACAAGGAGAUGAACGCCUUCGACGGCAAGACCAUCGACAAGGAGACCGGCAAGGUGCUGCACCA |
| | | GAAGACCCACUUCCCCCAGCCCUGGGAGUUCUUCGCCCAGGAGGUGAUGAUCCGGGUGUUCGGCAAGCCCGACGGCAAGCCCG |
| | | AGUUCGAGGAGGCCGACACCCCCGAGAAGCUGCGGACCCUGCUGGCCGAGAAGCUGUCCUCCCGGCCCGAGGCCGUGCACGAG |
| | | UACGUGACCCCCCUGUUCGUGUCCCGGGCCCCCAACCGGAAGAUGUCCGGCGCCCACAAGGACACCCUGCGGUCCGCCAAGCG |
| | | GUUCGUGAAGCACAACGAGAAGAUCUCCGUGAAGCGGGUGUGGCUGACCGAGAUCAAGCUGGCCGACCUGGAGAACAUGGUGA |
| | | ACUACAAGAACGGCCGGGAGAUCGAGCUGUACGAGGCCCUGAAGGCCCGGCUGGAGGCCUACGGCGGCAACGCCAAGCAGGCC |
| | | UUCGACCCCAAGGACAACCCCUUCUACAAGAAGGGCGGCCAGCUGGUGAAGGCCGUGCGGGUGGAGAAGACCCAGGAGUCCGG |
| | | CGUGCUGCUGAACAAGAAGAACGCCUACACCAUCGCCGACAACGGCGACAUGGUGCGGGUGGACGUGUUCUGCAAGGUGGACA |
| | | AGAAGGGCAAGAACCAGUACUUCAUCGUGCCCAUCUACGCCUGGCAGGUGGCCGAGAACAUCCUGCCCGACAUCGACUGCAAG |
| | | GGCUACCGGAUCGACGACUCCUACACCUUCUGCUUCUCCCUGCACAAGUACGACCUGAUCGCCUUCCAGAAGGACGAGAAGUC |
| | | CAAGGUGGAGUUCGCCUACUACAUCAACUGCGACUCCUCCAACGGCCGGUUCUACCUGGCCUGGCACGACAAGGGCUCCAAGG |
| | | AGCAGCAGUUCCGGAUCUCCACCCAGAACCUGGUGCUGAUCCAGAAGUACCAGGUGAACGAGCUGGGCAAGGAGAUCCGGCCC |
| | | UGCCGGCUGAAGAAGCGGCCCCCCGUGCGGUAGCUAGCACCAGCCUCAAGAACACCCGAAUGGAGUCUCUAAGCUACAUAAUA |
| | | CCAACUUACACUUUACAAAAUGUUGUCCCCCAAAAUGUAGCCAUUCGUAUCUGCUCCUAAUAAAAAGAAAGUUUCUUCACAUU |
| | | CUCUCGAGAAAAAAAAAAAAUGGAAAAAAAAAAAACGGAAAAAAAAAAAAGGUAAAAAAAAAAAAUAUAAAAAAAAAAAACAU |
| | | AAAAAAAAAAAACGAAAAAAAAAAAACGUAAAAAAAAAAAACUCAAAAAAAAAAAGAUAAAAAAAAAAAACCUAAAAAAAAAA |
| | | AAUGUAAAAAAAAAAAAGGGAAAAAAAAAAAACGCAAAAAAAAAAAACACAAAAAAAAAAAAUGCAAAAAAAAAAAAUCGAAA |
| | | AAAAAAAAAUCUAAAAAAAAAAAACGAAAAAAAAAAAACCCAAAAAAAAAAAAGACAAAAAAAAAAAAUAGAAAAAAAAAAAG |
| | | UUAAAAAAAAAAAACUGAAAAAAAAAAAAUUUAAAAAAAAAAAAUCUAG |
| mRNA S | 28 | GGGAAGCUCAGAAUAAACGCUCAACUUUGGCCGGAUCUGCCACCAUGGACGGCUCCGGCGGCGGCUCCCCCAAGAAGAAGCGG |
| encoding | | AAGGUGGAGGACAAGCGGCCCGCCGCCACCAAGAAGGCCGGCCAGGCCAAGAAGAAGAAGGGCGGCUCCGGCGGCGGCGAGGC |
| Nme2Cas9 | | CUCCCCCGCCUCCGGCCCCCGGCACCUGAUGGACCCCCACAUCUUCACCUCCAACUUCAACAACGGCAUCGGCCGGCACAAGA |
| base | | CCUACCUGUGCUACGAGGUGGAGCGGCUGGACAACGGCACCUCCGUGAAGAUGGACCAGCACCGGGGCUUCCUGCACAACCAG |
| editor | | GCCAAGAACCUGCUGUGCGGCUUCUACGGCCGGCACGCCGAGCUGCGGUUCCUGGACCUGGUGCCCUCCCUGCAGCUGGACCC |
| | | CGCCCAGAUCUACCGGGUGACCUGGUUCAUCUCCUGGUCCCCCUGCUUCUCCUGGGGCUGCGCCGGCGAGGUGCGGGCCUUCC |
| | | UGCAGGAGAACACCCACGUGCGGCUGCGGAUCUUCGCCGCCCGGAUCUACGACUACGACCCCCUGUACAAGGAGGCCCUGCAG |
| | | AUGCUGCGGGACGCCGGCGCCCAGGUGUCCAUCAUGACCUACGACGAGUUCAAGCACUGCUGGGACACCUUCGUGGACCACCA |
| | | GGGCUGCCCCUUCCAGCCCUGGGACGGCCUGGACGAGCACUCCCAGGCCCUGUCCGGCCGGCUGCGGGCCAUCCUGCAGAACC |
| | | AGGGCAACUCCGGCUCCGAGACCCCCGGCACCUCCGAGUCCGCCACCCCCGAGUCCGCAGCGUUCAAACCAAAUCCCAUCAAC |
| | | UACAUCCUGGGCCUGGCCAUCGGCAUCGCCUCCGUGGGCUGGGCCAUGGUGGAGAUCGACGAGGAGGAGAACCCCAUCCGGCU |
| | | GAUCGACCUGGGCGUGCGGGUGUUCGAGCGGGCCGAGGUGCCCAAGACCGGCGACUCCCUGGCCAUGGCCCGGCGGCUGGCCC |
| | | GGUCCGUGCGGCGGCUGACCCGGCGGCGGGCCCACCGGCUGCUGCGGGCCCGGCGGCUGCUGAAGCGGGAGGGCGUGCUGCAG |
| | | GCCGCCGACUUCGACGAGAACGGCCUGAUCAAGUCCCUGCCCAACACCCCCUGGCAGCUGCGGGCCGCCGCCCUGGACCGGAA |
| | | GCUGACCCCCCUGGAGUGGUCCGCCGUGCUGCUGCACCUGAUCAAGCACCGGGGCUACCUGUCCCAGCGGAAGAACGAGGGCG |
| | | AGACCGCCGACAAGGAGCUGGGCGCCCUGCUGAAGGGCGUGGCCAACAACGCCCACGCCCUGCAGACCGGCGACUUCCGGACC |
| | | CCCGCCGAGCUGGCCCUGAACAAGUUCGAGAAGGAGUCCGGCCACAUCCGGAACCAGCGGGGCGACUACUCCCACACCUUCUC |
| | | CCGGAAGGACCUGCAGGCCGAGCUGAUCCUGCUGUUCGAGAAGCAGAAGGAGUUCGGCAACCCCCACGUGUCCGGCGGCCUGA |
| | | AGGAGGGCAUCGAGACCCUGCUGAUGACCCAGCGGCCCGCCCUGUCCGGCGACGCCGUGCAGAAGAUGCUGGGCCACUGCACC |
| | | UUCGAGCCCGCCGAGCCCAAGGCCGCCAAGAACACCUACACCGCCGAGCGGUUCAUCUGGCUGACCAAGCUGAACAACCUGCG |
| | | GAUCCUGGAGCAGGGCUCCGAGCGGCCCCUGACCGACACCGAGCGGGCCACCCUGAUGGACGAGCCCUACCGGAAGUCCAAGC |
| | | UGACCUACGCCCAGGCCCGGAAGCUGCUGGGCCUGGAGGACACCGCCUUCUUCAAGGGCCUGCGGUACGGCAAGGACAACGCC |
| | | GAGGCCUCCACCCUGAUGGAGAUGAAGGCCUACCACGCCAUCUCCCGGGCCCUGGAGAAGGAGGGCCUGAAGGACAAGAAGUC |
| | | CCCCCUGAACCUGUCCUCCGAGCUGCAGGACGAGAUCGGCACCGCCUUCUCCCUGUUCAAGACCGACGAGGACAUCACCGGCC |
| | | GGCUGAAGGACCGGGUGCAGCCCGAGAUCCUGGAGGCCCUGCUGAAGCACAUCUCCUUCGACAAGUUCGUGCAGAUCUCCCUG |
| | | AAGGCCCUGCGGCGGAUCGUGCCCCUGAUGGAGCAGGGCAAGCGGUACGACGAGGCCUGCGCCGAGAUCUACGGCGACCACUA |
| | | CGGCAAGAAGAACACCGAGGAGAAGAUCUACCUGCCCCCCAUCCCCGCCGACGAGAUCCGGAACCCCGUGGUGCUGCGGGCCC |
| | | UGUCCCAGGCCCGGAAGGUGAUCAACGGCGUGGUGCGGCGGUACGGCUCCCCCGCCCGGAUCCACAUCGAGACCGCCCGGGAG |
| | | GUGGGCAAGUCCUUCAAGGACCGGAAGGAGAUCGAGAAGCGGCAGGAGGAGAACCGGAAGGACCGGGAGAAGGCCGCCGCCAA |
| | | GUUCCGGGAGUACUUCCCCAACUUCGUGGGCGAGCCCAAGUCCAAGGACAUCCUGAAGCUGCGGCUGUACGAGCAGCAGCACG |
| | | GCAAGUGCCUGUACUCCGGCAAGGAGAUCAACCUGGUGCGGCUGAACGAGAAGGGCUACGUGGAGAUCGACCACGCCCUGCCC |
| | | UUCUCCCGGACCUGGGACGACUCCUUCAACAACAAGGUGCUGGUGCUGGGCUCCGAGAACCAGAACAAGGGCAACCAGACCCC |
| | | CUACGAGUACUUCAACGGCAAGGACAACUCCCGGGAGUGGCAGGAGUUCAAGGCCCGGGUGGAGACCUCCCGGUUCCCCCGGU |
| | | CCAAGAAGCAGCGGAUCCUGCUGCAGAAGUUCGACGAGGACGGCUUCAAGGAGUGCAACCUGAACGACACCCGGUACGUGAAC |
| | | CGCUUCCUGUGCCAGUUCGUGGCCGACCACAUCCUGCUGACCGGCAAGGGCAAGCGGCGGGUGUUCGCCUCCAACGGCCAGAU |
| | | CACCAACCUGCUGCGGGGCUUCUGGGGCCUGCGGAAGGUGCGGGCCGAGAACGACCGGCACCACGCCCUGGACGCCGUGGUGG |
| | | UGGCCUGCUCCACCGUGGCCAUGCAGCAGAAGAUCACCCGGUUCGUGCGGUACAAGGAGAUGAACGCCUUCGACGGCAAGACC |
| | | AUCGACAAGGAGACCGGCAAGGUGCUGCACCAGAAGACCCACUUCCCCCAGCCCUGGGAGUUCUUCGCCCAGGAGGUGAUGAU |
| | | CCGGGUGUUCGGCAAGCCCGACGGCAAGCCCGAGUUCGAGGAGGCCGACACCCCCGAGAAGCUGCGGACCCUGCUGGCCGAGA |
| | | AGCUGUCCUCCCGGCCCGAGGCCGUGCACGAGUACGUGACCCCCCUGUUCGUGUCCCGGGCCCCCAACCGGAAGAUGUCCGGC |
| | | GCCCACAAGGACACCCUGCGGUCCGCCAAGCGGUUCGUGAAGCACAACGAGAAGAUCUCCGUGAAGCGGGUGUGGCUGACCGA |
| | | GAUCAAGCUGGCCGACCUGGAGAACAUGGUGAACUACAAGAACGGCCGGGAGAUCGAGCUGUACGAGGCCCUGAAGGCCCGGC |
| | | UGGAGGCCUACGGCGGCAACGCCAAGCAGGCCUUCGACCCCAAGGACAACCCCUUCUACAAGAAGGGCGGCCAGCUGGUGAAG |
| | | GCCGUGCGGGUGGAGAAGACCCAGGAGUCCGGCGUGCUGCUGAACAAGAAGAACGCCUACACCAUCGCCGACAACGGCGACAU |
| | | GGUGCGGGUGGACGUGUUCUGCAAGGUGGACAAGAAGGGCAAGAACCAGUACUUCAUCGUGCCCAUCUACGCCUGGCAGGUGG |
| | | CCGAGAACAUCCUGCCCGACAUCGACUGCAAGGGCUACCGGAUCGACGACUCCUACACCUUCUGCUUCUCCCUGCACAAGUAC |
| | | GACCUGAUCGCCUUCCAGAAGGACGAGAAGUCCAAGGUGGAGUUCGCCUACUACAUCAACUGCGACUCCUCCAACGGCCGGUU |
| | | CUACCUGGCCUGGCACGACAAGGGCUCCAAGGAGCAGCAGUUCCGGAUCUCCACCCAGAACCUGGUGCUGAUCCAGAAGUACC |
| | | AGGUGAACGAGCUGGGCAAGGAGAUCCGGCCCUGCCGGCUGAAGAAGCGGCCCCCCGUGCGGUAGUGACUAGCACCAGCCUCA |
| | | AGAACACCCGAAUGGAGUCUCUAAGCUACAUAAUACCAACUUACACUUUACAAAAUGUUGUCCCCCAAAAUGUAGCCAUUCGU |
| | | AUCUGCUCCUAAUAAAAAGAAAGUUUCUUCACAUUCUCUCGAGAAAAAAAAAAAAUGGAAAAAAAAAAAACGGAAAAAAAAAA |
| | | AGGUAAAAAAAAAAAAUAUAAAAAAAAAAACAUAAAAAAAAAAAACGAAAAAAAAAAAACGUAAAAAAAAAAAACUCAAAAAA |
| | | AAAAAGAUAAAAAAAAAAAACCUAAAAAAAAAAAAUGUAAAAAAAAAAAAGGGAAAAAAAAAAACGCAAAAAAAAAAAACACA |
| | | AAAAAAAAAAAUGCAAAAAAAAAAAAUCGAAAAAAAAAAAAUCUAAAAAAAAAAAACGAAAAAAAAAAAACCCAAAAAAAAAA |
| | | AAGACAAAAAAAAAAAAUAGAAAAAAAAAAAGUUAAAAAAAAAAAACUGAAAAAAAAAAAAUUUAAAAAAAAAAAAUCUAG |
| Open | 29 | atgaccggtgccgccttcaagcccaaccccatcaactacatcctgggcctggacatcggcatcgcctccgtgggctgggccat |
| reading | | ggtggagatcgacgaggaggagaaccccatccggctgatcgacctgggcgtgcgggtgttcgagcgggccgaggtgcccaaga |
| frame for | | ccggcgactccctggccatggcccggcggctggcccggtccgtgcggcggctgacccggcggcgggcccaccggctgctgcgg |
| Nme2Cas9 | | gcccggcggctgctgaagcgggagggcgtgctgcaggccgccgacttcgacgagaacggcctgatcaagtccctgcccaacac |
| encoded | | cccctggcagctgcgggccgccgccctggaccggaagctgacccccctggagtggtccgccgtgctgctgcacctgatcaagc |
| by mRNA C | | accggggctacctgtcccagcggaagaacgagggcgagaccgccgacaaggagctgggcgccctgctgaagggcgtggccaac |
| | | aacgcccacgccctgcagaccggcgacttccggacccccgccgagctggccctgaacaagttcgagaaggagtccggccacat |
| | | ccggaaccagcggggcgactactcccacaccttctcccggaaggacctgcaggccgagctgatcctgctgttcgagaagcaga |
| | | aggagttcggcaacccccacgtgtccggcggcctgaaggagggcatcgagaccctgctgatgacccagcggcccgccctgtcc |
| | | ggcgacgccgtgcagaagatgctgggccactgcaccttcgagcccgccgagcccaaggccgccaagaacacctacaccgccga |
| | | gcggttcatctggctgaccaagctgaacaacctgcggatcctggagcagggctccgagcggcccctgaccgacaccgagcggg |
| | | ccaccctgatggacgagccctaccggaagtccaagctgacctacgcccaggcccggaagctgctgggcctggaggacaccgcc |
| | | ttcttcaagggcctgcggtacggcaaggacaacgccgaggcctccaccctgatggagatgaaggcctaccacgccatctcccg |
| | | ggccctggagaaggagggcctgaaggacaagaagtcccccctgaacctgtcctccgagctgcaggacgagatcggcaccgcct |
| | | tctccctgttcaagaccgacgaggacatcaccggccggctgaaggaccgggtgcagcccgagatcctggaggccctgctgaag |
| | | cacatctccttcgacaagttcgtgcagatctccctgaaggccctgcggcggatcgtgcccctgatggagcagggcaagcggta |
| | | cgacgaggcctgcgccgagatctacggcgaccactacggcaagaagaacaccgaggagaagatctacctgccccccatccccg |
| | | ccgacgagatccggaaccccgtggtgctgcgggccctgtcccaggcccggaaggtgatcaacggcgtggtgcggcggtacggc |
| | | tcccccgcccggatccacatcgagaccgcccgggaggtgggcaagtccttcaaggaccggaaggagatcgagaagcggcagga |
| | | ggagaaccggaaggaccgggagaaggccgccgccaagttccgggagtacttccccaacttcgtgggcgagcccaagtccaagg |
| | | acatcctgaagctgcggctgtacgagcagcagcacggcaagtgcctgtactccggcaaggagatcaacctggtgcggctgaac |
| | | gagaagggctacgtggagatcgaccacgccctgcccttctcccggacctgggacgactccttcaacaacaaggtgctggtgct |
| | | gggctccgagaaccagaacaagggcaaccagaccccctacgagtacttcaacggcaaggacaactcccgggagtggcaggagt |
| | | tcaaggcccgggtggagacctcccggttcccccggtccaagaagcagcggatcctgctgcagaagttcgacgaggacggcttc |
| | | aaggagtgcaacctgaacgacacccggtacgtgaaccgcttcctgtgccagttcgtggccgaccacatcctgctgaccggcaa |
| | | gggcaagcggcgggtgttcgcctccaacggccagatcaccaacctgctgcggggcttctggggcctgcggaaggtgcgggccg |
| | | agaacgaccggcaccacgccctggacgccgtggtggtggcctgctccaccgtggccatgcagcagaagatcacccggttcgtg |
| | | cggtacaaggagatgaacgccttcgacggcaagaccatcgacaaggagaccggcaaggtgctgcaccagaagacccacttccc |
| | | ccagccctgggagttcttcgcccaggaggtgatgatccgggtgttcggcaagcccgacggcaagcccgagttcgaggaggccg |
| | | acacccccgagaagctgcggaccctgctggccgagaagctgtcctcccggcccgaggccgtgcacgagtacgtgacccccctg |
| | | ttcgtgtcccgggcccccaaccggaagatgtccggcgcccacaaggacaccctgcggtccgccaagcggttcgtgaagcacaa |
| | | cgagaagatctccgtgaagcgggtgtggctgaccgagatcaagctggccgacctggagaacatggtgaactacaagaacggcc |
| | | gggagatcgagctgtacgaggccctgaaggcccggctggaggcctacggcggcaacgccaagcaggccttcgaccccaaggac |
| | | aaccccttctacaagaagggcggccagctggtgaaggccgtgcgggtggagaagacccaggagtccggcgtgctgctgaacaa |
| | | gaagaacgcctacaccatcgccgacaacggcgacatggtgcgggtggacgtgttctgcaaggtggacaagaagggcaagaacc |
| | | agtacttcatcgtgcccatctacgcctggcaggtggccgagaacatcctgcccgacatcgactgcaagggctaccggatcgac |
| | | gactcctacaccttctgcttctccctgcacaagtacgacctgatcgccttccagaaggacgagaagtccaaggtggagttcgc |
| | | ctactacatcaactgcgactcctccaacggccggttctacctggcctggcacgacaagggctccaaggagcagcagttccgga |
| | | tctccacccagaacctggtgctgatccagaagtaccaggtgaacgagctgggcaaggagatccggccctgccggctgaagaag |
| | | cggccccccgtgcggtccggaaagcggaccgccgacggctccgagttcgagtcccccaagaagaagcggaaggtggagtag |
| Open | 30 | ATGgaggcctcccccgcctccggcccccggcacctgatggacccccacatcttcacctccAACTTCAACAACggcATCggccg |
| reading | | gCACAAGaccTACCTGTGCTACgaggtggagcggCTGGACAACggcacctccgtgAAGATGGACCAGCACcggggcTTCCTGC |
| frame for | | ACAACCAGgccAAGAACCTGCTGTGCggcTTCTACggccggCACgccgagCTGcggTTCCTGGACCTGgtgccctccCTGCAG |
| SpyCas9 | | CTGGACcccgccCAGATCTACcgggtgaccTGGTTCATCtccTGGtcccccTGCTTCtccTGGggcTGCgccggcgaggtgcg |
| base | | ggccTTCCTGCAGgagAACaccCACgtgcggCTGcggATCTTCgccgcccggATCTACGACTACGACcccCTGTACAAGgagg |
| editor | | CCCTGCAGATGCTGcggGACgccggcgccCAGgtgtccATCATGaccTACGACgagTTCAAGCACTGCTGGGACaccTTCgtg |
| encoded | | GACCACCAGggcTGCcccTTCCAGcccTGGGACggcCTGGACgagCACtccCAGgccCTGtccggccggCTGcgggccATCCT |
| by mRNA E | | GCAGAACCAGggcAACtccggctccgagacccccggcacctccgagtccgccacccccgagtccgacaagaagtactccatcg |
| | | gcctggCcatcggcaccaactccgtgggctgggccgtgatcaccgacgagtacaaggtgccctccaagaagttcaaggtgctg |
| | | ggcaacaccgaccggcactccatcaagaagaacctgatcggcgccctgctgttcgactccggcgagaccgccgaggccacccg |
| | | gctgaagcggaccgcccggcggcggtacacccggcggaagaaccggatctgctacctgcaggagatcttctccaacgagatgg |
| | | ccaaggtggacgactccttcttccaccggctggaggagtccttcctggtggaggaggacaagaagcacgagcggcaccccatc |
| | | ttcggcaacatcgtggacgaggtggcctaccacgagaagtaccccaccatctaccacctgcggaagaagctggtggactccac |
| | | cgacaaggccgacctgcggctgatctacctggccctggcccacatgatcaagttccggggccacttcctgatcgagggcgacc |
| | | tgaaccccgacaactccgacgtggacaagctgttcatccagctggtgcagacctacaaccagctgttcgaggagaaccccatc |
| | | aacgcctccggcgtggacgccaaggccatcctgtccgcccggctgtccaagtcccggcggctggagaacctgatcgcccagct |
| | | gcccggcgagaagaagaacggcctgttcggcaacctgatcgccctgtccctgggcctgacccccaacttcaagtccaacttcg |
| | | acctggccgaggacgccaagctgcagctgtccaaggacacctacgacgacgacctggacaacctgctggcccagatcggcgac |
| | | cagtacgccgacctgttcctggccgccaagaacctgtccgacgccatcctgctgtccgacatcctgcgggtgaacaccgagat |
| | | caccaaggcccccctgtccgcctccatgatcaagcggtacgacgagcaccaccaggacctgaccctgctgaaggccctggtgc |
| | | ggcagcagctgcccgagaagtacaaggagatcttcttcgaccagtccaagaacggctacgccggctacatcgacggcggcgcc |
| | | tcccaggaggagttctacaagttcatcaagcccatcctggagaagatggacggcaccgaggagctgctggtgaagctgaaccg |
| | | ggaggacctgctgcggaagcagcggaccttcgacaacggctccatcccccaccagatccacctgggcgagctgcacgccatcc |
| | | tgcggcggcaggaggacttctaccccttcctgaaggacaaccgggagaagatcgagaagatcctgaccttccggatcccctac |
| | | tacgtgggccccctggcccggggcaactcccggttcgcctggatgacccggaagtccgaggagaccatcaccccctggaactt |
| | | cgaggaggtggtggacaagggcgcctccgcccagtccttcatcgagcggatgaccaacttcgacaagaacctgcccaacgaga |
| | | aggtgctgcccaagcactccctgctgtacgagtacttcaccgtgtacaacgagctgaccaaggtgaagtacgtgaccgagggc |
| | | atgcggaagcccgccttcctgtccggcgagcagaagaaggccatcgtggacctgctgttcaagaccaaccggaaggtgaccgt |
| | | gaagcagctgaaggaggactacttcaagaagatcgagtgcttcgactccgtggagatctccggcgtggaggaccggttcaacg |
| | | cctccctgggcacctaccacgacctgctgaagatcatcaaggacaaggacttcctggacaacgaggagaacgaggacatcctg |
| | | gaggacatcgtgctgaccctgaccctgttcgaggaccgggagatgatcgaggagcggctgaagacctacgcccacctgttcga |
| | | cgacaaggtgatgaagcagctgaagcggcggcggtacaccggctggggccggctgtcccggaagctgatcaacggcatccggg |
| | | acaagcagtccggcaagaccatcctggacttcctgaagtccgacggcttcgccaaccggaacttcatgcagctgatccacgac |
| | | gactccctgaccttcaaggaggacatccagaaggcccaggtgtccggccagggcgactccctgcacgagcacatcgccaacct |
| | | ggccggctcccccgccatcaagaagggcatcctgcagaccgtgaaggtggtggacgagctggtgaaggtgatgggccggcaca |
| | | agcccgagaacatcgtgatcgagatggcccgggagaaccagaccacccagaagggccagaagaactcccgggagcggatgaag |
| | | cggatcgaggagggcatcaaggagctgggctcccagatcctgaaggagcaccccgtggagaacacccagctgcagaacgagaa |
| | | gctgtacctgtactacctgcagaacggccgggacatgtacgtggaccaggagctggacatcaaccggctgtccgactacgacg |
| | | tggaccacatcgtgccccagtccttcctgaaggacgactccatcgacaacaaggtgctgacccggtccgacaagaaccggggc |
| | | aagtccgacaacgtgccctccgaggaggtggtgaagaagatgaagaactactggcggcagctgctgaacgccaagctgatcac |
| | | ccagcggaagttcgacaacctgaccaaggccgagcggggcggcctgtccgagctggacaaggccggcttcatcaagcggcagc |
| | | tggtggagacccggcagatcaccaagcacgtggcccagatcctggactcccggatgaacaccaagtacgacgagaacgacaag |
| | | ctgatccgggaggtgaaggtgatcaccctgaagtccaagctggtgtccgacttccggaaggacttccagttctacaaggtgcg |
| | | ggagatcaacaactaccaccacgcccacgacgcctacctgaacgccgtggtgggcaccgccctgatcaagaagtaccccaagc |
| | | tggagtccgagttcgtgtacggcgactacaaggtgtacgacgtgcggaagatgatcgccaagtccgagcaggagatcggcaag |
| | | gccaccgccaagtacttcttctactccaacatcatgaacttcttcaagaccgagatcaccctggccaacggcgagatccggaa |
| | | gcggcccctgatcgagaccaacggcgagaccggcgagatcgtgtgggacaagggccgggacttcgccaccgtgcggaaggtgc |
| | | tgtccatgccccaggtgaacatcgtgaagaagaccgaggtgcagaccggcggcttctccaaggagtccatcctgcccaagcgg |
| | | aactccgacaagctgatcgcccggaagaaggactgggaccccaagaagtacggcggcttcgactcccccaccgtggcctactc |
| | | cgtgctggtggtggccaaggtggagaagggcaagtccaagaagctgaagtccgtgaaggagctgctgggcatcaccatcatgg |
| | | agcggtcctccttcgagaagaaccccatcgacttcctggaggccaagggctacaaggaggtgaagaaggacctgatcatcaag |
| | | ctgcccaagtactccctgttcgagctggagaacggccggaagcggatgctggcctccgccggcgagctgcagaagggcaacga |
| | | gctggccctgccctccaagtacgtgaacttcctgtacctggcctcccactacgagaagctgaagggctcccccgaggacaacg |
| | | agcagaagcagctgttcgtggagcagcacaagcactacctggacgagatcatcgagcagatctccgagttctccaagcgggtg |
| | | atcctggccgacgccaacctggacaaggtgctgtccgcctacaacaagcaccgggacaagcccatccgggagcaggccgagaa |
| | | catcatccacctgttcaccctgaccaacctgggcgcccccgccgccttcaagtacttcgacaccaccatcgaccggaagcggt |
| | | acacctccaccaaggaggtgctggacgccaccctgatccaccagtccatcaccggcctgtacgagacccggatcgacctgtcc |
| | | cagctgggcggcgacggcggcggctcccccaagaagaagcggaaggtgTgA |
| Open | 31 | ATGACCAACCTGTCCGACATCATCGAGAAGGAGACCGGCAAGCAGCTGGTGATCCAGGAGTCCATCCTGATGCTGCCCGAGGA |
| reading | | GGTGGAGGAGGTGATCGGCAACAAGCCCGAGTCCGACATCCTGGTGCACACCGCCTACGACGAGTCCACCGACGAGAACGTGA |
| frame for | | TGCTGCTGACCTCCGACGCCCCCGAGTACAAGCCCTGGGCCCTGGTGATCCAGGACTCCAACGGCGAGAACAAGATCAAGATG |
| UGI | | CTGTCCGGCGGCTCCAAGCGGACCGCCGACGGCTCCGAGTTCGAGTCCCCCAAGAAGAAGCGGAAGGTGGAGTGATAG |
| encoded | | |
| by mRNA G | | |
| Open | 32 | ATGGCCGCCTTCAAGCCCAACCCCATCAACTACATCCTGGGCCTGGACATCGGCATCGCCTCCGTGGGCTGGGCCATGGTGGA |
| reading | | GATCGACGAGGAGGAGAACCCCATCCGGCTGATCGACCTGGGCGTGCGGGTGTTCGAGCGGGCCGAGGTGCCCAAGACCGGCG |
| frame for | | ACTCCCTGGCCATGGCCCGGCGGCTGGCCCGGTCCGTGCGGCGGCTGACCCGGCGGCGGGCCCACCGGCTGCTGCGGGCCCGG |
| Nme2Cas9 | | CGGCTGCTGAAGCGGGAGGGCGTGCTGCAGGCCGCCGACTTCGACGAGAACGGCCTGATCAAGTCCCTGCCCAACACCCCCTG |
| encoded | | GCAGCTGCGGGCCGCCGCCCTGGACCGGAAGCTGACCCCCCTGGAGTGGTCCGCCGTGCTGCTGCACCTGATCAAGCACCGGG |
| by mRNA H | | GCTACCTGTCCCAGCGGAAGAACGAGGGCGAGACCGCCGACAAGGAGCTGGGCGCCCTGCTGAAGGGCGTGGCCAACAACGCC |
| | | CACGCCCTGCAGACCGGCGACTTCCGGACCCCCGCCGAGCTGGCCCTGAACAAGTTCGAGAAGGAGTCCGGCCACATCCGGAA |
| | | CCAGCGGGGCGACTACTCCCACACCTTCTCCCGGAAGGACCTGCAGGCCGAGCTGATCCTGCTGTTCGAGAAGCAGAAGGAGT |
| | | TCGGCAACCCCCACGTGTCCGGCGGCCTGAAGGAGGGCATCGAGACCCTGCTGATGACCCAGCGGCCCGCCCTGTCCGGCGAC |
| | | GCCGTGCAGAAGATGCTGGGCCACTGCACCTTCGAGCCCGCCGAGCCCAAGGCCGCCAAGAACACCTACACCGCCGAGCGGTT |
| | | CATCTGGCTGACCAAGCTGAACAACCTGCGGATCCTGGAGCAGGGCTCCGAGCGGCCCCTGACCGACACCGAGCGGGCCACCC |
| | | TGATGGACGAGCCCTACCGGAAGTCCAAGCTGACCTACGCCCAGGCCCGGAAGCTGCTGGGCCTGGAGGACACCGCCTTCTTC |
| | | AAGGGCCTGCGGTACGGCAAGGACAACGCCGAGGCCTCCACCCTGATGGAGATGAAGGCCTACCACGCCATCTCCCGGGCCCT |
| | | GGAGAAGGAGGGCCTGAAGGACAAGAAGTCCCCCCTGAACCTGTCCTCCGAGCTGCAGGACGAGATCGGCACCGCCTTCTCCC |
| | | TGTTCAAGACCGACGAGGACATCACCGGCCGGCTGAAGGACCGGGTGCAGCCCGAGATCCTGGAGGCCCTGCTGAAGCACATC |
| | | TCCTTCGACAAGTTCGTGCAGATCTCCCTGAAGGCCCTGCGGCGGATCGTGCCCCTGATGGAGCAGGGCAAGCGGTACGACGA |
| | | GGCCTGCGCCGAGATCTACGGCGACCACTACGGCAAGAAGAACACCGAGGAGAAGATCTACCTGCCCCCCATCCCCGCCGACG |
| | | AGATCCGGAACCCCGTGGTGCTGCGGGCCCTGTCCCAGGCCCGGAAGGTGATCAACGGCGTGGTGCGGCGGTACGGCTCCCCC |
| | | GCCCGGATCCACATCGAGACCGCCCGGGAGGTGGGCAAGTCCTTCAAGGACCGGAAGGAGATCGAGAAGCGGCAGGAGGAGAA |
| | | CCGGAAGGACCGGGAGAAGGCCGCCGCCAAGTTCCGGGAGTACTTCCCCAACTTCGTGGGCGAGCCCAAGTCCAAGGACATCC |
| | | TGAAGCTGCGGCTGTACGAGCAGCAGCACGGCAAGTGCCTGTACTCCGGCAAGGAGATCAACCTGGTGCGGCTGAACGAGAAG |
| | | GGCTACGTGGAGATCGACCACGCCCTGCCCTTCTCCCGGACCTGGGACGACTCCTTCAACAACAAGGTGCTGGTGCTGGGCTC |
| | | CGAGAACCAGAACAAGGGCAACCAGACCCCCTACGAGTACTTCAACGGCAAGGACAACTCCCGGGAGTGGCAGGAGTTCAAGG |
| | | CCCGGGTGGAGACCTCCCGGTTCCCCCGGTCCAAGAAGCAGCGGATCCTGCTGCAGAAGTTCGACGAGGACGGCTTCAAGGAG |
| | | TGCAACCTGAACGACACCCGGTACGTGAACCGGTTCCTGTGCCAGTTCGTGGCCGACCACATCCTGCTGACCGGCAAGGGCAA |
| | | GCGGCGGGTGTTCGCCTCCAACGGCCAGATCACCAACCTGCTGCGGGGCTTCTGGGGCCTGCGGAAGGTGCGGGCCGAGAACG |
| | | ACCGGCACCACGCCCTGGACGCCGTGGTGGTGGCCTGCTCCACCGTGGCCATGCAGCAGAAGATCACCCGGTTCGTGCGGTAC |
| | | AAGGAGATGAACGCCTTCGACGGCAAGACCATCGACAAGGAGACCGGCAAGGTGCTGCACCAGAAGACCCACTTCCCCCAGCC |
| | | CTGGGAGTTCTTCGCCCAGGAGGTGATGATCCGGGTGTTCGGCAAGCCCGACGGCAAGCCCGAGTTCGAGGAGGCCGACACCC |
| | | CCGAGAAGCTGCGGACCCTGCTGGCCGAGAAGCTGTCCTCCCGGCCCGAGGCCGTGCACGAGTACGTGACCCCCCTGTTCGTG |
| | | TCCCGGGCCCCCAACCGGAAGATGTCCGGCGCCCACAAGGACACCCTGCGGTCCGCCAAGCGGTTCGTGAAGCACAACGAGAA |
| | | GATCTCCGTGAAGCGGGTGTGGCTGACCGAGATCAAGCTGGCCGACCTGGAGAACATGGTGAACTACAAGAACGGCCGGGAGA |
| | | TCGAGCTGTACGAGGCCCTGAAGGCCCGGCTGGAGGCCTACGGCGGCAACGCCAAGCAGGCCTTCGACCCCAAGGACAACCCC |
| | | TTCTACAAGAAGGGCGGCCAGCTGGTGAAGGCCGTGCGGGTGGAGAAGACCCAGGAGTCCGGCGTGCTGCTGAACAAGAAGAA |
| | | CGCCTACACCATCGCCGACAACGGCGACATGGTGCGGGTGGACGTGTTCTGCAAGGTGGACAAGTCCGGCGGCGGCTCCCCCA |
| | | AGAAGAAGCGGAAGGTGTCCGGCGGCTCCGGCAAGAACCAGTACTTCATCGTGCCCATCTACGCCTGGCAGGTGGCCGAGAAC |
| | | ATCCTGCCCGACATCGACTGCAAGGGCTACCGGATCGACGACTCCTACACCTTCTGCTTCTCCCTGCACAAGTACGACCTGAT |
| | | CGCCTTCCAGAAGGACGAGAAGTCCAAGGTGGAGTTCGCCTACTACATCAACTGCGACTCCTCCAACGGCCGGTTCTACCTGG |
| | | CCTGGCACGACAAGGGCTCCAAGGAGCAGCAGTTCCGGATCTCCACCCAGAACCTGGTGCTGATCCAGAAGTACCAGGTGAAC |
| | | GAGCTGGGCAAGGAGATCCGGCCCTGCCGGCTGAAGAAGCGGCCCCCCGTGCGGTAG |
| Open | 33 | ATGGTGCCCAAGAAGAAGCGGAAGGTGGCCGCCTTCAAGCCCAACCCCATCAACTACATCCTGGGCCTGGACATCGGCATCGC |
| reading | | CTCCGTGGGCTGGGCCATGGTGGAGATCGACGAGGAGGAGAACCCCATCCGGCTGATCGACCTGGGCGTGCGGGTGTTCGAGC |
| frame for | | GGGCCGAGGTGCCCAAGACCGGCGACTCCCTGGCCATGGCCCGGCGGCTGGCCCGGTCCGTGCGGCGGCTGACCCGGCGGCGG |
| Nme2Cas9 | | GCCCACCGGCTGCTGCGGGCCCGGCGGCTGCTGAAGCGGGAGGGCGTGCTGCAGGCCGCCGACTTCGACGAGAACGGCCTGAT |
| encoded | | CAAGTCCCTGCCCAACACCCCCTGGCAGCTGCGGGCCGCCGCCCTGGACCGGAAGCTGACCCCCCTGGAGTGGTCCGCCGTGC |
| by mRNA I | | TGCTGCACCTGATCAAGCACCGGGGCTACCTGTCCCAGCGGAAGAACGAGGGCGAGACCGCCGACAAGGAGCTGGGCGCCCTG |
| | | CTGAAGGGCGTGGCCAACAACGCCCACGCCCTGCAGACCGGCGACTTCCGGACCCCCGCCGAGCTGGCCCTGAACAAGTTCGA |
| | | GAAGGAGTCCGGCCACATCCGGAACCAGCGGGGCGACTACTCCCACACCTTCTCCCGGAAGGACCTGCAGGCCGAGCTGATCC |
| | | TGCTGTTCGAGAAGCAGAAGGAGTTCGGCAACCCCCACGTGTCCGGCGGCCTGAAGGAGGGCATCGAGACCCTGCTGATGACC |
| | | CAGCGGCCCGCCCTGTCCGGCGACGCCGTGCAGAAGATGCTGGGCCACTGCACCTTCGAGCCCGCCGAGCCCAAGGCCGCCAA |
| | | GAACACCTACACCGCCGAGCGGTTCATCTGGCTGACCAAGCTGAACAACCTGCGGATCCTGGAGCAGGGCTCCGAGCGGCCCC |
| | | TGACCGACACCGAGCGGGCCACCCTGATGGACGAGCCCTACCGGAAGTCCAAGCTGACCTACGCCCAGGCCCGGAAGCTGCTG |
| | | GGCCTGGAGGACACCGCCTTCTTCAAGGGCCTGCGGTACGGCAAGGACAACGCCGAGGCCTCCACCCTGATGGAGATGAAGGC |
| | | CTACCACGCCATCTCCCGGGCCCTGGAGAAGGAGGGCCTGAAGGACAAGAAGTCCCCCCTGAACCTGTCCTCCGAGCTGCAGG |
| | | ACGAGATCGGCACCGCCTTCTCCCTGTTCAAGACCGACGAGGACATCACCGGCCGGCTGAAGGACCGGGTGCAGCCCGAGATC |
| | | CTGGAGGCCCTGCTGAAGCACATCTCCTTCGACAAGTTCGTGCAGATCTCCCTGAAGGCCCTGCGGCGGATCGTGCCCCTGAT |
| | | GGAGCAGGGCAAGCGGTACGACGAGGCCTGCGCCGAGATCTACGGCGACCACTACGGCAAGAAGAACACCGAGGAGAAGATCT |
| | | ACCTGCCCCCCATCCCCGCCGACGAGATCCGGAACCCCGTGGTGCTGCGGGCCCTGTCCCAGGCCCGGAAGGTGATCAACGGC |
| | | GTGGTGCGGCGGTACGGCTCCCCCGCCCGGATCCACATCGAGACCGCCCGGGAGGTGGGCAAGTCCTTCAAGGACCGGAAGGA |
| | | GATCGAGAAGCGGCAGGAGGAGAACCGGAAGGACCGGGAGAAGGCCGCCGCCAAGTTCCGGGAGTACTTCCCCAACTTCGTGG |
| | | GCGAGCCCAAGTCCAAGGACATCCTGAAGCTGCGGCTGTACGAGCAGCAGCACGGCAAGTGCCTGTACTCCGGCAAGGAGATC |
| | | AACCTGGTGCGGCTGAACGAGAAGGGCTACGTGGAGATCGACCACGCCCTGCCCTTCTCCCGGACCTGGGACGACTCCTTCAA |
| | | CAACAAGGTGCTGGTGCTGGGCTCCGAGAACCAGAACAAGGGCAACCAGACCCCCTACGAGTACTTCAACGGCAAGGACAACT |
| | | CCCGGGAGTGGCAGGAGTTCAAGGCCCGGGTGGAGACCTCCCGGTTCCCCCGGTCCAAGAAGCAGCGGATCCTGCTGCAGAAG |
| | | TTCGACGAGGACGGCTTCAAGGAGTGCAACCTGAACGACACCCGGTACGTGAACCGGTTCCTGTGCCAGTTCGTGGCCGACCA |
| | | CATCCTGCTGACCGGCAAGGGCAAGCGGCGGGTGTTCGCCTCCAACGGCCAGATCACCAACCTGCTGCGGGGCTTCTGGGGCC |
| | | TGCGGAAGGTGCGGGCCGAGAACGACCGGCACCACGCCCTGGACGCCGTGGTGGTGGCCTGCTCCACCGTGGCCATGCAGCAG |
| | | AAGATCACCCGGTTCGTGCGGTACAAGGAGATGAACGCCTTCGACGGCAAGACCATCGACAAGGAGACCGGCAAGGTGCTGCA |
| | | CCAGAAGACCCACTTCCCCCAGCCCTGGGAGTTCTTCGCCCAGGAGGTGATGATCCGGGTGTTCGGCAAGCCCGACGGCAAGC |
| | | CCGAGTTCGAGGAGGCCGACACCCCCGAGAAGCTGCGGACCCTGCTGGCCGAGAAGCTGTCCTCCCGGCCCGAGGCCGTGCAC |
| | | GAGTACGTGACCCCCCTGTTCGTGTCCCGGGCCCCCAACCGGAAGATGTCCGGCGCCCACAAGGACACCCTGCGGTCCGCCAA |
| | | GCGGTTCGTGAAGCACAACGAGAAGATCTCCGTGAAGCGGGTGTGGCTGACCGAGATCAAGCTGGCCGACCTGGAGAACATGG |
| | | TGAACTACAAGAACGGCCGGGAGATCGAGCTGTACGAGGCCCTGAAGGCCCGGCTGGAGGCCTACGGCGGCAACGCCAAGCAG |
| | | GCCTTCGACCCCAAGGACAACCCCTTCTACAAGAAGGGCGGCCAGCTGGTGAAGGCCGTGCGGGTGGAGAAGACCCAGGAGTC |
| | | CGGCGTGCTGCTGAACAAGAAGAACGCCTACACCATCGCCGACAACGGCGACATGGTGCGGGTGGACGTGTTCTGCAAGGTGG |
| | | ACAAGAAGGGCAAGAACCAGTACTTCATCGTGCCCATCTACGCCTGGCAGGTGGCCGAGAACATCCTGCCCGACATCGACTGC |
| | | AAGGGCTACCGGATCGACGACTCCTACACCTTCTGCTTCTCCCTGCACAAGTACGACCTGATCGCCTTCCAGAAGGACGAGAA |
| | | GTCCAAGGTGGAGTTCGCCTACTACATCAACTGCGACTCCTCCAACGGCCGGTTCTACCTGGCCTGGCACGACAAGGGCTCCA |
| | | AGGAGCAGCAGTTCCGGATCTCCACCCAGAACCTGGTGCTGATCCAGAAGTACCAGGTGAACGAGCTGGGCAAGGAGATCCGG |
| | | CCCTGCCGGCTGAAGAAGCGGCCCCCCGTGCGGTACCCCTACGACGTGCCCGACTACGCCGCCGCCCCCGCCGCCAAGAAGAA |
| | | GAAGCTGGACTAG |
| Open | 34 | ATGGCCGCCTTCAAGCCCAACCCCATCAACTACATCCTGGGCCTGGACATCGGCATCGCCTCCGTGGGCTGGGCCATGGTGGA |
| reading | | GATCGACGAGGAGGAGAACCCCATCCGGCTGATCGACCTGGGCGTGCGGGTGTTCGAGCGGGCCGAGGTGCCCAAGACCGGCG |
| frame for | | ACTCCCTGGCCATGGCCCGGCGGCTGGCCCGGTCCGTGCGGCGGCTGACCCGGCGGCGGGCCCACCGGCTGCTGCGGGCCCGG |
| Nme2Cas9 | | CGGCTGCTGAAGCGGGAGGGCGTGCTGCAGGCCGCCGACTTCGACGAGAACGGCCTGATCAAGTCCCTGCCCAACACCCCCTG |
| encoded | | GCAGCTGCGGGCCGCCGCCCTGGACCGGAAGCTGACCCCCCTGGAGTGGTCCGCCGTGCTGCTGCACCTGATCAAGCACCGGG |
| by mRNA J | | GCTACCTGTCCCAGCGGAAGAACGAGGGCGAGACCGCCGACAAGGAGCTGGGCGCCCTGCTGAAGGGCGTGGCCAACAACGCC |
| | | CACGCCCTGCAGACCGGCGACTTCCGGACCCCCGCCGAGCTGGCCCTGAACAAGTTCGAGAAGGAGTCCGGCCACATCCGGAA |
| | | CCAGCGGGGCGACTACTCCCACACCTTCTCCCGGAAGGACCTGCAGGCCGAGCTGATCCTGCTGTTCGAGAAGCAGAAGGAGT |
| | | TCGGCAACCCCCACGTGTCCGGCGGCCTGAAGGAGGGCATCGAGACCCTGCTGATGACCCAGCGGCCCGCCCTGTCCGGCGAC |
| | | GCCGTGCAGAAGATGCTGGGCCACTGCACCTTCGAGCCCGCCGAGCCCAAGGCCGCCAAGAACACCTACACCGCCGAGCGGTT |
| | | CATCTGGCTGACCAAGCTGAACAACCTGCGGATCCTGGAGCAGGGCTCCGAGCGGCCCCTGACCGACACCGAGCGGGCCACCC |
| | | TGATGGACGAGCCCTACCGGAAGTCCAAGCTGACCTACGCCCAGGCCCGGAAGCTGCTGGGCCTGGAGGACACCGCCTTCTTC |
| | | AAGGGCCTGCGGTACGGCAAGGACAACGCCGAGGCCTCCACCCTGATGGAGATGAAGGCCTACCACGCCATCTCCCGGGCCCT |
| | | GGAGAAGGAGGGCCTGAAGGACAAGAAGTCCCCCCTGAACCTGTCCTCCGAGCTGCAGGACGAGATCGGCACCGCCTTCTCCC |
| | | TGTTCAAGACCGACGAGGACATCACCGGCCGGCTGAAGGACCGGGTGCAGCCCGAGATCCTGGAGGCCCTGCTGAAGCACATC |
| | | TCCTTCGACAAGTTCGTGCAGATCTCCCTGAAGGCCCTGCGGCGGATCGTGCCCCTGATGGAGCAGGGCAAGCGGTACGACGA |
| | | GGCCTGCGCCGAGATCTACGGCGACCACTACGGCAAGAAGAACACCGAGGAGAAGATCTACCTGCCCCCCATCCCCGCCGACG |
| | | AGATCCGGAACCCCGTGGTGCTGCGGGCCCTGTCCCAGGCCCGGAAGGTGATCAACGGCGTGGTGCGGCGGTACGGCTCCCCC |
| | | GCCCGGATCCACATCGAGACCGCCCGGGAGGTGGGCAAGTCCTTCAAGGACCGGAAGGAGATCGAGAAGCGGCAGGAGGAGAA |
| | | CCGGAAGGACCGGGAGAAGGCCGCCGCCAAGTTCCGGGAGTACTTCCCCAACTTCGTGGGCGAGCCCAAGTCCAAGGACATCC |
| | | TGAAGCTGCGGCTGTACGAGCAGCAGCACGGCAAGTGCCTGTACTCCGGCAAGGAGATCAACCTGGTGCGGCTGAACGAGAAG |
| | | GGCTACGTGGAGATCGACCACGCCCTGCCCTTCTCCCGGACCTGGGACGACTCCTTCAACAACAAGGTGCTGGTGCTGGGCTC |
| | | CGAGAACCAGAACAAGGGCAACCAGACCCCCTACGAGTACTTCAACGGCAAGGACAACTCCCGGGAGTGGCAGGAGTTCAAGG |
| | | CCCGGGTGGAGACCTCCCGGTTCCCCCGGTCCAAGAAGCAGCGGATCCTGCTGCAGAAGTTCGACGAGGACGGCTTCAAGGAG |
| | | TGCAACCTGAACGACACCCGGTACGTGAACCGGTTCCTGTGCCAGTTCGTGGCCGACCACATCCTGCTGACCGGCAAGGGCAA |
| | | GCGGCGGGTGTTCGCCTCCAACGGCCAGATCACCAACCTGCTGCGGGGCTTCTGGGGCCTGCGGAAGGTGCGGGCCGAGAACG |
| | | ACCGGCACCACGCCCTGGACGCCGTGGTGGTGGCCTGCTCCACCGTGGCCATGCAGCAGAAGATCACCCGGTTCGTGCGGTAC |
| | | AAGGAGATGAACGCCTTCGACGGCAAGACCATCGACAAGGAGACCGGCAAGGTGCTGCACCAGAAGACCCACTTCCCCCAGCC |
| | | CTGGGAGTTCTTCGCCCAGGAGGTGATGATCCGGGTGTTCGGCAAGCCCGACGGCAAGCCCGAGTTCGAGGAGGCCGACACCC |
| | | CCGAGAAGCTGCGGACCCTGCTGGCCGAGAAGCTGTCCTCCCGGCCCGAGGCCGTGCACGAGTACGTGACCCCCCTGTTCGTG |
| | | TCCCGGGCCCCCAACCGGAAGATGTCCGGCGCCCACAAGGACACCCTGCGGTCCGCCAAGCGGTTCGTGAAGCACAACGAGAA |
| | | GATCTCCGTGAAGCGGGTGTGGCTGACCGAGATCAAGCTGGCCGACCTGGAGAACATGGTGAACTACAAGAACGGCCGGGAGA |
| | | TCGAGCTGTACGAGGCCCTGAAGGCCCGGCTGGAGGCCTACGGCGGCAACGCCAAGCAGGCCTTCGACCCCAAGGACAACCCC |
| | | TTCTACAAGAAGGGCGGCCAGCTGGTGAAGGCCGTGCGGGTGGAGAAGACCCAGGAGTCCGGCGTGCTGCTGAACAAGAAGAA |
| | | CGCCTACACCATCGCCGACAACGGCGACATGGTGCGGGTGGACGTGTTCTGCAAGGTGGACAAGAAGGGCAAGAACCAGTACT |
| | | TCATCGTGCCCATCTACGCCTGGCAGGTGGCCGAGAACATCCTGCCCGACATCGACTGCAAGGGCTACCGGATCGACGACTCC |
| | | TACACCTTCTGCTTCTCCCTGCACAAGTACGACCTGATCGCCTTCCAGAAGGACGAGAAGTCCAAGGTGGAGTTCGCCTACTA |
| | | CATCAACTGCGACTCCTCCAACGGCCGGTTCTACCTGGCCTGGCACGACAAGGGCTCCAAGGAGCAGCAGTTCCGGATCTCCA |
| | | CCCAGAACCTGGTGCTGATCCAGAAGTACCAGGTGAACGAGCTGGGCAAGGAGATCCGGCCCTGCCGGCTGAAGAAGCGGCCC |
| | | CCCGTGCGG |
| Open | 35 | atggccgccttcaagcccaaccccatcaactacatcctgggcctggacatcggcatcgcctccgtgggctgggccatggtgga |
| reading | | gatcgacgaggaggagaaccccatccggctgatcgacctgggcgtgcgggtgttcgagcgggccgaggtgcccaagaccggcg |
| frame for | | actccctggccatggcccggcggctggcccggtccgtgcggcggctgacccggcggcgggcccaccggctgctgcgggcccgg |
| Nme2Cas9 | | cggctgctgaagcgggagggcgtgctgcaggccgccgacttcgacgagaacggcctgatcaagtccctgcccaacaccccctg |
| encoded | | gcagctgcgggccgccgccctggaccggaagctgacccccctggagtggtccgccgtgctgctgcacctgatcaagcaccggg |
| by mRNA K | | gctacctgtcccagcggaagaacgagggcgagaccgccgacaaggagctgggcgccctgctgaagggcgtggccaacaacgcc |
| | | cacgccctgcagaccggcgacttccggacccccgccgagctggccctgaacaagttcgagaaggagtccggccacatccggaa |
| | | ccagcggggcgactactcccacaccttctcccggaaggacctgcaggccgagctgatcctgctgttcgagaagcagaaggagt |
| | | tcggcaacccccacgtgtccggcggcctgaaggagggcatcgagaccctgctgatgacccagcggcccgccctgtccggcgac |
| | | gccgtgcagaagatgctgggccactgcaccttcgagcccgccgagcccaaggccgccaagaacacctacaccgccgagcggtt |
| | | catctggctgaccaagctgaacaacctgcggatcctggagcagggctccgagcggcccctgaccgacaccgagcgggccaccc |
| | | tgatggacgagccctaccggaagtccaagctgacctacgcccaggcccggaagctgctgggcctggaggacaccgccttcttc |
| | | aagggcctgcggtacggcaaggacaacgccgaggcctccaccctgatggagatgaaggcctaccacgccatctcccgggccct |
| | | ggagaaggagggcctgaaggacaagaagtcccccctgaacctgtcctccgagctgcaggacgagatcggcaccgccttctccc |
| | | tgttcaagaccgacgaggacatcaccggccggctgaaggaccgggtgcagcccgagatcctggaggccctgctgaagcacatc |
| | | tccttcgacaagttcgtgcagatctccctgaaggccctgcggcggatcgtgcccctgatggagcagggcaagcggtacgacga |
| | | ggcctgcgccgagatctacggcgaccactacggcaagaagaacaccgaggagaagatctacctgccccccatccccgccgacg |
| | | agatccggaaccccgtggtgctgcgggccctgtcccaggcccggaaggtgatcaacggcgtggtgcggcggtacggctccccc |
| | | gcccggatccacatcgagaccgcccgggaggtgggcaagtccttcaaggaccggaaggagatcgagaagcggcaggaggagaa |
| | | ccggaaggaccgggagaaggccgccgccaagttccgggagtacttccccaacttcgtgggcgagcccaagtccaaggacatcc |
| | | tgaagctgcggctgtacgagcagcagcacggcaagtgcctgtactccggcaaggagatcaacctggtgcggctgaacgagaag |
| | | ggctacgtggagatcgaccacgccctgcccttctcccggacctgggacgactccttcaacaacaaggtgctggtgctgggctc |
| | | cgagaaccagaacaagggcaaccagaccccctacgagtacttcaacggcaaggacaactcccgggagtggcaggagttcaagg |
| | | cccgggtggagacctcccggttcccccggtccaagaagcagcggatcctgctgcagaagttcgacgaggacggcttcaaggag |
| | | tgcaacctgaacgacacccggtacgtgaaccggttcctgtgccagttcgtggccgaccacatcctgctgaccggcaagggcaa |
| | | gcggcgggtgttcgcctccaacggccagatcaccaacctgctgcggggcttctggggcctgcggaaggtgcgggccgagaacg |
| | | accggcaccacgccctggacgccgtggtggtggcctgctccaccgtggccatgcagcagaagatcacccggttcgtgcggtac |
| | | aaggagatgaacgccttcgacggcaagaccatcgacaaggagaccggcaaggtgctgcaccagaagacccacttcccccagcc |
| | | ctgggagttcttcgcccaggaggtgatgatccgggtgttcggcaagcccgacggcaagcccgagttcgaggaggccgacaccc |
| | | ccgagaagctgcggaccctgctggccgagaagctgtcctcccggcccgaggccgtgcacgagtacgtgacccccctgttcgtg |
| | | tcccgggcccccaaccggaagatgtccggcgcccacaaggacaccctgcggtccgccaagcggttcgtgaagcacaacgagaa |
| | | gatctccgtgaagcgggtgtggctgaccgagatcaagctggccgacctggagaacatggtgaactacaagaacggccgggaga |
| | | tcgagctgtacgaggccctgaaggcccggctggaggcctacggcggcaacgccaagcaggccttcgaccccaaggacaacccc |
| | | ttctacaagaagggcggccagctggtgaaggccgtgcgggtggagaagacccaggagtccggcgtgctgctgaacaagaagaa |
| | | cgcctacaccatcgccgacaacggcgacatggtgcgggtggacgtgttctgcaaggtggacaagaagggcaagaaccagtact |
| | | tcatcgtgcccatctacgcctggcaggtggccgagaacatcctgcccgacatcgactgcaagggctaccggatcgacgactcc |
| | | tacaccttctgcttctccctgcacaagtacgacctgatcgccttccagaaggacgagaagtccaaggtggagttcgcctacta |
| | | catcaactgcgactcctccaacggccggttctacctggcctggcacgacaagggctccaaggagcagcagttccggatctcca |
| | | cccagaacctggtgctgatccagaagtaccaggtgaacgagctgggcaaggagatccggccctgccggctgaagaagcggccc |
| | | cccgtgcgg |
| Open | 36 | atgGACGGCTCCGGCGGCGGCTCCCCCAAGAAGAAGCGGAAGGTGGGCGGCTCCGGCGGCGGCgccgccttcaagcccaaccc |
| reading | | catcaactacatcctgggcctggacatcggcatcgcctccgtgggctgggccatggtggagatcgacgaggaggagaacccca |
| frame for | | tccggctgatcgacctgggcgtgcgggtgttcgagcgggccgaggtgcccaagaccggcgactccctggccatggcccggcgg |
| Nme2Cas9 | | ctggcccggtccgtgcggcggctgacccggcggcgggcccaccggctgctgcgggcccggcggctgctgaagcgggagggcgt |
| encoded | | gctgcaggccgccgacttcgacgagaacggcctgatcaagtccctgcccaacaccccctggcagctgcgggccgccgccctgg |
| by mRNA L | | accggaagctgacccccctggagtggtccgccgtgctgctgcacctgatcaagcaccggggctacctgtcccagcggaagaac |
| | | gagggcgagaccgccgacaaggagctgggcgccctgctgaagggcgtggccaacaacgcccacgccctgcagaccggcgactt |
| | | ccggacccccgccgagctggccctgaacaagttcgagaaggagtccggccacatccggaaccagcggggcgactactcccaca |
| | | ccttctcccggaaggacctgcaggccgagctgatcctgctgttcgagaagcagaaggagttcggcaacccccacgtgtccggc |
| | | ggcctgaaggagggcatcgagaccctgctgatgacccagcggcccgccctgtccggcgacgccgtgcagaagatgctgggcca |
| | | ctgcaccttcgagcccgccgagcccaaggccgccaagaacacctacaccgccgagcggttcatctggctgaccaagctgaaca |
| | | acctgcggatcctggagcagggctccgagcggcccctgaccgacaccgagcgggccaccctgatggacgagccctaccggaag |
| | | tccaagctgacctacgcccaggcccggaagctgctgggcctggaggacaccgccttcttcaagggcctgcggtacggcaagga |
| | | caacgccgaggcctccaccctgatggagatgaaggcctaccacgccatctcccgggccctggagaaggagggcctgaaggaca |
| | | agaagtcccccctgaacctgtcctccgagctgcaggacgagatcggcaccgccttctccctgttcaagaccgacgaggacatc |
| | | accggccggctgaaggaccgggtgcagcccgagatcctggaggccctgctgaagcacatctccttcgacaagttcgtgcagat |
| | | ctccctgaaggccctgcggcggatcgtgcccctgatggagcagggcaagcggtacgacgaggcctgcgccgagatctacggcg |
| | | accactacggcaagaagaacaccgaggagaagatctacctgccccccatccccgccgacgagatccggaaccccgtggtgctg |
| | | cgggccctgtcccaggcccggaaggtgatcaacggcgtggtgcggcggtacggctcccccgcccggatccacatcgagaccgc |
| | | ccgggaggtgggcaagtccttcaaggaccggaaggagatcgagaagcggcaggaggagaaccggaaggaccgggagaaggccg |
| | | ccgccaagttccgggagtacttccccaacttcgtgggcgagcccaagtccaaggacatcctgaagctgcggctgtacgagcag |
| | | cagcacggcaagtgcctgtactccggcaaggagatcaacctggtgcggctgaacgagaagggctacgtggagatcgaccacgc |
| | | cctgcccttctcccggacctgggacgactccttcaacaacaaggtgctggtgctgggctccgagaaccagaacaagggcaacc |
| | | agaccccctacgagtacttcaacggcaaggacaactcccgggagtggcaggagttcaaggcccgggtggagacctcccggttc |
| | | ccccggtccaagaagcagcggatcctgctgcagaagttcgacgaggacggcttcaaggagtgcaacctgaacgacacccggta |
| | | cgtgaaccggttcctgtgccagttcgtggccgaccacatcctgctgaccggcaagggcaagcggcgggtgttcgcctccaacg |
| | | gccagatcaccaacctgctgcggggcttctggggcctgcggaaggtgcgggccgagaacgaccggcaccacgccctggacgcc |
| | | gtggtggtggcctgctccaccgtggccatgcagcagaagatcacccggttcgtgcggtacaaggagatgaacgccttcgacgg |
| | | caagaccatcgacaaggagaccggcaaggtgctgcaccagaagacccacttcccccagccctgggagttcttcgcccaggagg |
| | | tgatgatccgggtgttcggcaagcccgacggcaagcccgagttcgaggaggccgacacccccgagaagctgcggaccctgctg |
| | | gccgagaagctgtcctcccggcccgaggccgtgcacgagtacgtgacccccctgttcgtgtcccgggcccccaaccggaagat |
| | | gtccggcgcccacaaggacaccctgcggtccgccaagcggttcgtgaagcacaacgagaagatctccgtgaagcgggtgtggc |
| | | tgaccgagatcaagctggccgacctggagaacatggtgaactacaagaacggccgggagatcgagctgtacgaggccctgaag |
| | | gcccggctggaggcctacggcggcaacgccaagcaggccttcgaccccaaggacaaccccttctacaagaagggcggccagct |
| | | ggtgaaggccgtgcgggtggagaagacccaggagtccggcgtgctgctgaacaagaagaacgcctacaccatcgccgacaacg |
| | | gcgacatggtgcgggtggacgtgttctgcaaggtggacaagaagggcaagaaccagtacttcatcgtgcccatctacgcctgg |
| | | caggtggccgagaacatcctgcccgacatcgactgcaagggctaccggatcgacgactcctacaccttctgcttctccctgca |
| | | caagtacgacctgatcgccttccagaaggacgagaagtccaaggtggagttcgcctactacatcaactgcgactcctccaacg |
| | | gccggttctacctggcctggcacgacaagggctccaaggagcagcagttccggatctccacccagaacctggtgctgatccag |
| | | aagtaccaggtgaacgagctgggcaaggagatccggccctgccggctgaagaagcggccccccgtgcggtag |
| Open | 37 | ATGGACGGCTCCGGCGGCGGCTCCCCCAAGAAGAAGCGGAAGGTGGGCGGCTCCGGCGGCGGCGCCGCCTTCAAGCCCAACCC |
| reading | | CATCAACTACATCCTGGGCCTGGACATCGGCATCGCCTCCGTGGGCTGGGCCATGGTGGAGATCGACGAGGAGGAGAACCCCA |
| frame for | | TCCGGCTGATCGACCTGGGCGTGCGGGTGTTCGAGCGGGCCGAGGTGCCCAAGACCGGCGACTCCCTGGCCATGGCCCGGCGG |
| Nme2Cas9 | | CTGGCCCGGTCCGTGCGGCGGCTGACCCGGCGGCGGGCCCACCGGCTGCTGCGGGCCCGGCGGCTGCTGAAGCGGGAGGGCGT |
| with | | GCTGCAGGCCGCCGACTTCGACGAGAACGGCCTGATCAAGTCCCTGCCCAACACCCCCTGGCAGCTGCGGGCCGCCGCCCTGG |
| HiBiT tag | | ACCGGAAGCTGACCCCCCTGGAGTGGTCCGCCGTGCTGCTGCACCTGATCAAGCACCGGGGCTACCTGTCCCAGCGGAAGAAC |
| encoded | | GAGGGCGAGACCGCCGACAAGGAGCTGGGCGCCCTGCTGAAGGGCGTGGCCAACAACGCCCACGCCCTGCAGACCGGCGACTT |
| by mRNA M | | CCGGACCCCCGCCGAGCTGGCCCTGAACAAGTTCGAGAAGGAGTCCGGCCACATCCGGAACCAGCGGGGCGACTACTCCCACA |
| | | CCTTCTCCCGGAAGGACCTGCAGGCCGAGCTGATCCTGCTGTTCGAGAAGCAGAAGGAGTTCGGCAACCCCCACGTGTCCGGC |
| | | GGCCTGAAGGAGGGCATCGAGACCCTGCTGATGACCCAGCGGCCCGCCCTGTCCGGCGACGCCGTGCAGAAGATGCTGGGCCA |
| | | CTGCACCTTCGAGCCCGCCGAGCCCAAGGCCGCCAAGAACACCTACACCGCCGAGCGGTTCATCTGGCTGACCAAGCTGAACA |
| | | ACCTGCGGATCCTGGAGCAGGGCTCCGAGCGGCCCCTGACCGACACCGAGCGGGCCACCCTGATGGACGAGCCCTACCGGAAG |
| | | TCCAAGCTGACCTACGCCCAGGCCCGGAAGCTGCTGGGCCTGGAGGACACCGCCTTCTTCAAGGGCCTGCGGTACGGCAAGGA |
| | | CAACGCCGAGGCCTCCACCCTGATGGAGATGAAGGCCTACCACGCCATCTCCCGGGCCCTGGAGAAGGAGGGCCTGAAGGACA |
| | | AGAAGTCCCCCCTGAACCTGTCCTCCGAGCTGCAGGACGAGATCGGCACCGCCTTCTCCCTGTTCAAGACCGACGAGGACATC |
| | | ACCGGCCGGCTGAAGGACCGGGTGCAGCCCGAGATCCTGGAGGCCCTGCTGAAGCACATCTCCTTCGACAAGTTCGTGCAGAT |
| | | CTCCCTGAAGGCCCTGCGGCGGATCGTGCCCCTGATGGAGCAGGGCAAGCGGTACGACGAGGCCTGCGCCGAGATCTACGGCG |
| | | ACCACTACGGCAAGAAGAACACCGAGGAGAAGATCTACCTGCCCCCCATCCCCGCCGACGAGATCCGGAACCCCGTGGTGCTG |
| | | CGGGCCCTGTCCCAGGCCCGGAAGGTGATCAACGGCGTGGTGCGGCGGTACGGCTCCCCCGCCCGGATCCACATCGAGACCGC |
| | | CCGGGAGGTGGGCAAGTCCTTCAAGGACCGGAAGGAGATCGAGAAGCGGCAGGAGGAGAACCGGAAGGACCGGGAGAAGGCCG |
| | | CCGCCAAGTTCCGGGAGTACTTCCCCAACTTCGTGGGCGAGCCCAAGTCCAAGGACATCCTGAAGCTGCGGCTGTACGAGCAG |
| | | CAGCACGGCAAGTGCCTGTACTCCGGCAAGGAGATCAACCTGGTGCGGCTGAACGAGAAGGGCTACGTGGAGATCGACCACGC |
| | | CCTGCCCTTCTCCCGGACCTGGGACGACTCCTTCAACAACAAGGTGCTGGTGCTGGGCTCCGAGAACCAGAACAAGGGCAACC |
| | | AGACCCCCTACGAGTACTTCAACGGCAAGGACAACTCCCGGGAGTGGCAGGAGTTCAAGGCCCGGGTGGAGACCTCCCGGTTC |
| | | CCCCGGTCCAAGAAGCAGCGGATCCTGCTGCAGAAGTTCGACGAGGACGGCTTCAAGGAGTGCAACCTGAACGACACCCGGTA |
| | | CGTGAACCGGTTCCTGTGCCAGTTCGTGGCCGACCACATCCTGCTGACCGGCAAGGGCAAGCGGCGGGTGTTCGCCTCCAACG |
| | | GCCAGATCACCAACCTGCTGCGGGGCTTCTGGGGCCTGCGGAAGGTGCGGGCCGAGAACGACCGGCACCACGCCCTGGACGCC |
| | | GTGGTGGTGGCCTGCTCCACCGTGGCCATGCAGCAGAAGATCACCCGGTTCGTGCGGTACAAGGAGATGAACGCCTTCGACGG |
| | | CAAGACCATCGACAAGGAGACCGGCAAGGTGCTGCACCAGAAGACCCACTTCCCCCAGCCCTGGGAGTTCTTCGCCCAGGAGG |
| | | TGATGATCCGGGTGTTCGGCAAGCCCGACGGCAAGCCCGAGTTCGAGGAGGCCGACACCCCCGAGAAGCTGCGGACCCTGCTG |
| | | GCCGAGAAGCTGTCCTCCCGGCCCGAGGCCGTGCACGAGTACGTGACCCCCCTGTTCGTGTCCCGGGCCCCCAACCGGAAGAT |
| | | GTCCGGCGCCCACAAGGACACCCTGCGGTCCGCCAAGCGGTTCGTGAAGCACAACGAGAAGATCTCCGTGAAGCGGGTGTGGC |
| | | TGACCGAGATCAAGCTGGCCGACCTGGAGAACATGGTGAACTACAAGAACGGCCGGGAGATCGAGCTGTACGAGGCCCTGAAG |
| | | GCCCGGCTGGAGGCCTACGGCGGCAACGCCAAGCAGGCCTTCGACCCCAAGGACAACCCCTTCTACAAGAAGGGCGGCCAGCT |
| | | GGTGAAGGCCGTGCGGGTGGAGAAGACCCAGGAGTCCGGCGTGCTGCTGAACAAGAAGAACGCCTACACCATCGCCGACAACG |
| | | GCGACATGGTGCGGGTGGACGTGTTCTGCAAGGTGGACAAGAAGGGCAAGAACCAGTACTTCATCGTGCCCATCTACGCCTGG |
| | | CAGGTGGCCGAGAACATCCTGCCCGACATCGACTGCAAGGGCTACCGGATCGACGACTCCTACACCTTCTGCTTCTCCCTGCA |
| | | CAAGTACGACCTGATCGCCTTCCAGAAGGACGAGAAGTCCAAGGTGGAGTTCGCCTACTACATCAACTGCGACTCCTCCAACG |
| | | GCCGGTTCTACCTGGCCTGGCACGACAAGGGCTCCAAGGAGCAGCAGTTCCGGATCTCCACCCAGAACCTGGTGCTGATCCAG |
| | | AAGTACCAGGTGAACGAGCTGGGCAAGGAGATCCGGCCCTGCCGGCTGAAGAAGCGGCCCCCCGTGCGGTCCGAGTCCGCCAC |
| | | CCCCGAGTCCGTGTCCGGCTGGCGGCTGTTCAAGAAGATCTCCTAG |
| Open | 38 | atgGACGGCTCCGGCGGCGGCTCCCCCAAGAAGAAGCGGAAGGTGGGCGGCTCCGGCGGCGGCgccgccttcaagcccaaccc |
| reading | | catcaactacatcctgggcctggacatcggcatcgcctccgtgggctgggccatggtggagatcgacgaggaggagaacccca |
| frame for | | tccggctgatcgacctgggcgtgcgggtgttcgagcgggccgaggtgcccaagaccggcgactccctggccatggcccggcgg |
| Nme2Cas9 | | ctggcccggtccgtgcggcggctgacccggcggcgggcccaccggctgctgcgggcccggcggctgctgaagcgggagggcgt |
| encoded | | gctgcaggccgccgacttcgacgagaacggcctgatcaagtccctgcccaacaccccctggcagctgcgggccgccgccctgg |
| by mRNA N | | accggaagctgacccccctggagtggtccgccgtgctgctgcacctgatcaagcaccggggctacctgtcccagcggaagaac |
| | | gagggcgagaccgccgacaaggagctgggcgccctgctgaagggcgtggccaacaacgcccacgccctgcagaccggcgactt |
| | | ccggacccccgccgagctggccctgaacaagttcgagaaggagtccggccacatccggaaccagcggggcgactactcccaca |
| | | ccttctcccggaaggacctgcaggccgagctgatcctgctgttcgagaagcagaaggagttcggcaacccccacgtgtccggc |
| | | ggcctgaaggagggcatcgagaccctgctgatgacccagcggcccgccctgtccggcgacgccgtgcagaagatgctgggcca |
| | | ctgcaccttcgagcccgccgagcccaaggccgccaagaacacctacaccgccgagcggttcatctggctgaccaagctgaaca |
| | | acctgcggatcctggagcagggctccgagcggcccctgaccgacaccgagcgggccaccctgatggacgagccctaccggaag |
| | | tccaagctgacctacgcccaggcccggaagctgctgggcctggaggacaccgccttcttcaagggcctgcggtacggcaagga |
| | | caacgccgaggcctccaccctgatggagatgaaggcctaccacgccatctcccgggccctggagaaggagggcctgaaggaca |
| | | agaagtcccccctgaacctgtcctccgagctgcaggacgagatcggcaccgccttctccctgttcaagaccgacgaggacatc |
| | | accggccggctgaaggaccgggtgcagcccgagatcctggaggccctgctgaagcacatctccttcgacaagttcgtgcagat |
| | | ctccctgaaggccctgcggcggatcgtgcccctgatggagcagggcaagcggtacgacgaggcctgcgccgagatctacggcg |
| | | accactacggcaagaagaacaccgaggagaagatctacctgccccccatccccgccgacgagatccggaaccccgtggtgctg |
| | | cgggccctgtcccaggcccggaaggtgatcaacggcgtggtgcggcggtacggctcccccgcccggatccacatcgagaccgc |
| | | ccgggaggtgggcaagtccttcaaggaccggaaggagatcgagaagcggcaggaggagaaccggaaggaccgggagaaggccg |
| | | ccgccaagttccgggagtacttccccaacttcgtgggcgagcccaagtccaaggacatcctgaagctgcggctgtacgagcag |
| | | cagcacggcaagtgcctgtactccggcaaggagatcaacctggtgcggctgaacgagaagggctacgtggagatcgaccacgc |
| | | cctgcccttctcccggacctgggacgactccttcaacaacaaggtgctggtgctgggctccgagaaccagaacaagggcaacc |
| | | agaccccctacgagtacttcaacggcaaggacaactcccgggagtggcaggagttcaaggcccgggtggagacctcccggttc |
| | | ccccggtccaagaagcagcggatcctgctgcagaagttcgacgaggacggcttcaaggagtgcaacctgaacgacacccggta |
| | | cgtgaaccggttcctgtgccagttcgtggccgaccacatcctgctgaccggcaagggcaagcggcgggtgttcgcctccaacg |
| | | gccagatcaccaacctgctgcggggcttctggggcctgcggaaggtgcgggccgagaacgaccggcaccacgccctggacgcc |
| | | gtggtggtggcctgctccaccgtggccatgcagcagaagatcacccggttcgtgcggtacaaggagatgaacgccttcgacgg |
| | | caagaccatcgacaaggagaccggcaaggtgctgcaccagaagacccacttcccccagccctgggagttcttcgcccaggagg |
| | | tgatgatccgggtgttcggcaagcccgacggcaagcccgagttcgaggaggccgacacccccgagaagctgcggaccctgctg |
| | | gccgagaagctgtcctcccggcccgaggccgtgcacgagtacgtgacccccctgttcgtgtcccgggcccccaaccggaagat |
| | | gtccggcgcccacaaggacaccctgcggtccgccaagcggttcgtgaagcacaacgagaagatctccgtgaagcgggtgtggc |
| | | tgaccgagatcaagctggccgacctggagaacatggtgaactacaagaacggccgggagatcgagctgtacgaggccctgaag |
| | | gcccggctggaggcctacggcggcaacgccaagcaggccttcgaccccaaggacaaccccttctacaagaagggcggccagct |
| | | ggtgaaggccgtgcgggtggagaagacccaggagtccggcgtgctgctgaacaagaagaacgcctacaccatcgccgacaacg |
| | | gcgacatggtgcgggtggacgtgttctgcaaggtggacaagaagggcaagaaccagtacttcatcgtgcccatctacgcctgg |
| | | caggtggccgagaacatcctgcccgacatcgactgcaagggctaccggatcgacgactcctacaccttctgcttctccctgca |
| | | caagtacgacctgatcgccttccagaaggacgagaagtccaaggtggagttcgcctactacatcaactgcgactcctccaacg |
| | | gccggttctacctggcctggcacgacaagggctccaaggagcagcagttccggatctccacccagaacctggtgctgatccag |
| | | aagtaccaggtgaacgagctgggcaaggagatccggccctgccggctgaagaagcggccccccgtgcggTCCGGAAAGCGGAC |
| | | CGCCGACGGCTCCGGAGGAGGAAGCCCCGCCGCCAAGAAGAAGAAGCTGGACtag |
| Open | 39 | atgGACGGCTCCGGCGGCGGCTCCCCCAAGAAGAAGCGGAAGGTGGAGGACAAGCGGCCCGCCGCCACCAAGAAGGCCGGCCA |
| reading | | GGCCAAGAAGAAGAAGGGCGGCTCCGGCGGCGGCgccgccttcaagcccaaccccatcaactacatcctgggcctggacatcg |
| frame for | | gcatcgcctccgtgggctgggccatggtggagatcgacgaggaggagaaccccatccggctgatcgacctgggcgtgcgggtg |
| Nme2Cas9 | | ttcgagcgggccgaggtgcccaagaccggcgactccctggccatggcccggcggctggcccggtccgtgcggcggctgacccg |
| encoded | | gcggcgggcccaccggctgctgcgggcccggcggctgctgaagcgggagggcgtgctgcaggccgccgacttcgacgagaacg |
| by mRNA O | | gcctgatcaagtccctgcccaacaccccctggcagctgcgggccgccgccctggaccggaagctgacccccctggagtggtcc |
| | | gccgtgctgctgcacctgatcaagcaccggggctacctgtcccagcggaagaacgagggcgagaccgccgacaaggagctggg |
| | | cgccctgctgaagggcgtggccaacaacgcccacgccctgcagaccggcgacttccggacccccgccgagctggccctgaaca |
| | | agttcgagaaggagtccggccacatccggaaccagcggggcgactactcccacaccttctcccggaaggacctgcaggccgag |
| | | ctgatcctgctgttcgagaagcagaaggagttcggcaacccccacgtgtccggcggcctgaaggagggcatcgagaccctgct |
| | | gatgacccagcggcccgccctgtccggcgacgccgtgcagaagatgctgggccactgcaccttcgagcccgccgagcccaagg |
| | | ccgccaagaacacctacaccgccgagcggttcatctggctgaccaagctgaacaacctgcggatcctggagcagggctccgag |
| | | cggcccctgaccgacaccgagcgggccaccctgatggacgagccctaccggaagtccaagctgacctacgcccaggcccggaa |
| | | gctgctgggcctggaggacaccgccttcttcaagggcctgcggtacggcaaggacaacgccgaggcctccaccctgatggaga |
| | | tgaaggcctaccacgccatctcccgggccctggagaaggagggcctgaaggacaagaagtcccccctgaacctgtcctccgag |
| | | ctgcaggacgagatcggcaccgccttctccctgttcaagaccgacgaggacatcaccggccggctgaaggaccgggtgcagcc |
| | | cgagatcctggaggccctgctgaagcacatctccttcgacaagttcgtgcagatctccctgaaggccctgcggcggatcgtgc |
| | | ccctgatggagcagggcaagcggtacgacgaggcctgcgccgagatctacggcgaccactacggcaagaagaacaccgaggag |
| | | aagatctacctgccccccatccccgccgacgagatccggaaccccgtggtgctgcgggccctgtcccaggcccggaaggtgat |
| | | caacggcgtggtgcggcggtacggctcccccgcccggatccacatcgagaccgcccgggaggtgggcaagtccttcaaggacc |
| | | ggaaggagatcgagaagcggcaggaggagaaccggaaggaccgggagaaggccgccgccaagttccgggagtacttccccaac |
| | | ttcgtgggcgagcccaagtccaaggacatcctgaagctgcggctgtacgagcagcagcacggcaagtgcctgtactccggcaa |
| | | ggagatcaacctggtgcggctgaacgagaagggctacgtggagatcgaccacgccctgcccttctcccggacctgggacgact |
| | | ccttcaacaacaaggtgctggtgctgggctccgagaaccagaacaagggcaaccagaccccctacgagtacttcaacggcaag |
| | | gacaactcccgggagtggcaggagttcaaggcccgggtggagacctcccggttcccccggtccaagaagcagcggatcctgct |
| | | gcagaagttcgacgaggacggcttcaaggagtgcaacctgaacgacacccggtacgtgaaccggttcctgtgccagttcgtgg |
| | | ccgaccacatcctgctgaccggcaagggcaagcggcgggtgttcgcctccaacggccagatcaccaacctgctgcggggcttc |
| | | tggggcctgcggaaggtgcgggccgagaacgaccggcaccacgccctggacgccgtggtggtggcctgctccaccgtggccat |
| | | gcagcagaagatcacccggttcgtgcggtacaaggagatgaacgccttcgacggcaagaccatcgacaaggagaccggcaagg |
| | | tgctgcaccagaagacccacttcccccagccctgggagttcttcgcccaggaggtgatgatccgggtgttcggcaagcccgac |
| | | ggcaagcccgagttcgaggaggccgacacccccgagaagctgcggaccctgctggccgagaagctgtcctcccggcccgaggc |
| | | cgtgcacgagtacgtgacccccctgttcgtgtcccgggcccccaaccggaagatgtccggcgcccacaaggacaccctgcggt |
| | | ccgccaagcggttcgtgaagcacaacgagaagatctccgtgaagcgggtgtggctgaccgagatcaagctggccgacctggag |
| | | aacatggtgaactacaagaacggccgggagatcgagctgtacgaggccctgaaggcccggctggaggcctacggcggcaacgc |
| | | caagcaggccttcgaccccaaggacaaccccttctacaagaagggcggccagctggtgaaggccgtgcgggtggagaagaccc |
| | | aggagtccggcgtgctgctgaacaagaagaacgcctacaccatcgccgacaacggcgacatggtgcgggtggacgtgttctgc |
| | | aaggtggacaagaagggcaagaaccagtacttcatcgtgcccatctacgcctggcaggtggccgagaacatcctgcccgacat |
| | | cgactgcaagggctaccggatcgacgactcctacaccttctgcttctccctgcacaagtacgacctgatcgccttccagaagg |
| | | acgagaagtccaaggtggagttcgcctactacatcaactgcgactcctccaacggccggttctacctggcctggcacgacaag |
| | | ggctccaaggagcagcagttccggatctccacccagaacctggtgctgatccagaagtaccaggtgaacgagctgggcaagga |
| | | gatccggccctgccggctgaagaagcggccccccgtgcggtag |
| Open | 40 | atgGACGGCTCCGGCGGCGGCTCCCCCAAGAAGAAGCGGAAGGTGGAGGACAAGCGGCCCGCCGCCACCAAGAAGGCCGGCCA |
| reading | | GGCCAAGAAGAAGAAGGGCGGCTCCGGCGGCGGCGCCGCCTTCAAGCCCAACCCCATCAACTACATCCTGGGCCTGGACATCG |
| frame for | | GCATCGCCTCCGTGGGCTGGGCCATGGTGGAGATCGACGAGGAGGAGAACCCCATCCGGCTGATCGACCTGGGCGTGCGGGTG |
| Nme2Cas9 | | TTCGAGCGGGCCGAGGTGCCCAAGACCGGCGACTCCCTGGCCATGGCCCGGCGGCTGGCCCGGTCCGTGCGGCGGCTGACCCG |
| with | | GCGGCGGGCCCACCGGCTGCTGCGGGCCCGGCGGCTGCTGAAGCGGGAGGGCGTGCTGCAGGCCGCCGACTTCGACGAGAACG |
| HiBiT tag | | GCCTGATCAAGTCCCTGCCCAACACCCCCTGGCAGCTGCGGGCCGCCGCCCTGGACCGGAAGCTGACCCCCCTGGAGTGGTCC |
| encoded | | GCCGTGCTGCTGCACCTGATCAAGCACCGGGGCTACCTGTCCCAGCGGAAGAACGAGGGCGAGACCGCCGACAAGGAGCTGGG |
| by mRNA P | | CGCCCTGCTGAAGGGCGTGGCCAACAACGCCCACGCCCTGCAGACCGGCGACTTCCGGACCCCCGCCGAGCTGGCCCTGAACA |
| | | AGTTCGAGAAGGAGTCCGGCCACATCCGGAACCAGCGGGGCGACTACTCCCACACCTTCTCCCGGAAGGACCTGCAGGCCGAG |
| | | CTGATCCTGCTGTTCGAGAAGCAGAAGGAGTTCGGCAACCCCCACGTGTCCGGCGGCCTGAAGGAGGGCATCGAGACCCTGCT |
| | | GATGACCCAGCGGCCCGCCCTGTCCGGCGACGCCGTGCAGAAGATGCTGGGCCACTGCACCTTCGAGCCCGCCGAGCCCAAGG |
| | | CCGCCAAGAACACCTACACCGCCGAGCGGTTCATCTGGCTGACCAAGCTGAACAACCTGCGGATCCTGGAGCAGGGCTCCGAG |
| | | CGGCCCCTGACCGACACCGAGCGGGCCACCCTGATGGACGAGCCCTACCGGAAGTCCAAGCTGACCTACGCCCAGGCCCGGAA |
| | | GCTGCTGGGCCTGGAGGACACCGCCTTCTTCAAGGGCCTGCGGTACGGCAAGGACAACGCCGAGGCCTCCACCCTGATGGAGA |
| | | TGAAGGCCTACCACGCCATCTCCCGGGCCCTGGAGAAGGAGGGCCTGAAGGACAAGAAGTCCCCCCTGAACCTGTCCTCCGAG |
| | | CTGCAGGACGAGATCGGCACCGCCTTCTCCCTGTTCAAGACCGACGAGGACATCACCGGCCGGCTGAAGGACCGGGTGCAGCC |
| | | CGAGATCCTGGAGGCCCTGCTGAAGCACATCTCCTTCGACAAGTTCGTGCAGATCTCCCTGAAGGCCCTGCGGCGGATCGTGC |
| | | CCCTGATGGAGCAGGGCAAGCGGTACGACGAGGCCTGCGCCGAGATCTACGGCGACCACTACGGCAAGAAGAACACCGAGGAG |
| | | AAGATCTACCTGCCCCCCATCCCCGCCGACGAGATCCGGAACCCCGTGGTGCTGCGGGCCCTGTCCCAGGCCCGGAAGGTGAT |
| | | CAACGGCGTGGTGCGGCGGTACGGCTCCCCCGCCCGGATCCACATCGAGACCGCCCGGGAGGTGGGCAAGTCCTTCAAGGACC |
| | | GGAAGGAGATCGAGAAGCGGCAGGAGGAGAACCGGAAGGACCGGGAGAAGGCCGCCGCCAAGTTCCGGGAGTACTTCCCCAAC |
| | | TTCGTGGGCGAGCCCAAGTCCAAGGACATCCTGAAGCTGCGGCTGTACGAGCAGCAGCACGGCAAGTGCCTGTACTCCGGCAA |
| | | GGAGATCAACCTGGTGCGGCTGAACGAGAAGGGCTACGTGGAGATCGACCACGCCCTGCCCTTCTCCCGGACCTGGGACGACT |
| | | CCTTCAACAACAAGGTGCTGGTGCTGGGCTCCGAGAACCAGAACAAGGGCAACCAGACCCCCTACGAGTACTTCAACGGCAAG |
| | | GACAACTCCCGGGAGTGGCAGGAGTTCAAGGCCCGGGTGGAGACCTCCCGGTTCCCCCGGTCCAAGAAGCAGCGGATCCTGCT |
| | | GCAGAAGTTCGACGAGGACGGCTTCAAGGAGTGCAACCTGAACGACACCCGGTACGTGAACCGGTTCCTGTGCCAGTTCGTGG |
| | | CCGACCACATCCTGCTGACCGGCAAGGGCAAGCGGCGGGTGTTCGCCTCCAACGGCCAGATCACCAACCTGCTGCGGGGCTTC |
| | | TGGGGCCTGCGGAAGGTGCGGGCCGAGAACGACCGGCACCACGCCCTGGACGCCGTGGTGGTGGCCTGCTCCACCGTGGCCAT |
| | | GCAGCAGAAGATCACCCGGTTCGTGCGGTACAAGGAGATGAACGCCTTCGACGGCAAGACCATCGACAAGGAGACCGGCAAGG |
| | | TGCTGCACCAGAAGACCCACTTCCCCCAGCCCTGGGAGTTCTTCGCCCAGGAGGTGATGATCCGGGTGTTCGGCAAGCCCGAC |
| | | GGCAAGCCCGAGTTCGAGGAGGCCGACACCCCCGAGAAGCTGCGGACCCTGCTGGCCGAGAAGCTGTCCTCCCGGCCCGAGGC |
| | | CGTGCACGAGTACGTGACCCCCCTGTTCGTGTCCCGGGCCCCCAACCGGAAGATGTCCGGCGCCCACAAGGACACCCTGCGGT |
| | | CCGCCAAGCGGTTCGTGAAGCACAACGAGAAGATCTCCGTGAAGCGGGTGTGGCTGACCGAGATCAAGCTGGCCGACCTGGAG |
| | | AACATGGTGAACTACAAGAACGGCCGGGAGATCGAGCTGTACGAGGCCCTGAAGGCCCGGCTGGAGGCCTACGGCGGCAACGC |
| | | CAAGCAGGCCTTCGACCCCAAGGACAACCCCTTCTACAAGAAGGGCGGCCAGCTGGTGAAGGCCGTGCGGGTGGAGAAGACCC |
| | | AGGAGTCCGGCGTGCTGCTGAACAAGAAGAACGCCTACACCATCGCCGACAACGGCGACATGGTGCGGGTGGACGTGTTCTGC |
| | | AAGGTGGACAAGAAGGGCAAGAACCAGTACTTCATCGTGCCCATCTACGCCTGGCAGGTGGCCGAGAACATCCTGCCCGACAT |
| | | CGACTGCAAGGGCTACCGGATCGACGACTCCTACACCTTCTGCTTCTCCCTGCACAAGTACGACCTGATCGCCTTCCAGAAGG |
| | | ACGAGAAGTCCAAGGTGGAGTTCGCCTACTACATCAACTGCGACTCCTCCAACGGCCGGTTCTACCTGGCCTGGCACGACAAG |
| | | GGCTCCAAGGAGCAGCAGTTCCGGATCTCCACCCAGAACCTGGTGCTGATCCAGAAGTACCAGGTGAACGAGCTGGGCAAGGA |
| | | GATCCGGCCCTGCCGGCTGAAGAAGCGGCCCCCCGTGCGGTCCGAGTCCGCCACCCCCGAGTCCGTGTCCGGCTGGCGGCTGT |
| | | TCAAGAAGATCTCCTAG |
| Open | 41 | atgGACGGCTCCGGCGGCGGCTCCGAGGACAAGCGGCCCGCCGCCACCAAGAAGGCCGGCCAGGCCAAGAAGAAGAAGGGCGG |
| reading | | CTCCGGCGGCGGCgccgccttcaagcccaaccccatcaactacatcctgggcctggacatcggcatcgcctccgtgggctggg |
| frame for | | ccatggtggagatcgacgaggaggagaaccccatccggctgatcgacctgggcgtgcgggtgttcgagcgggccgaggtgccc |
| Nme2Cas9 | | aagaccggcgactccctggccatggcccggcggctggcccggtccgtgcggcggctgacccggcggcgggcccaccggctgct |
| encoded | | gcgggcccggcggctgctgaagcgggagggcgtgctgcaggccgccgacttcgacgagaacggcctgatcaagtccctgccca |
| by mRNA Q | | acaccccctggcagctgcgggccgccgccctggaccggaagctgacccccctggagtggtccgccgtgctgctgcacctgatc |
| | | aagcaccggggctacctgtcccagcggaagaacgagggcgagaccgccgacaaggagctgggcgccctgctgaagggcgtggc |
| | | caacaacgcccacgccctgcagaccggcgacttccggacccccgccgagctggccctgaacaagttcgagaaggagtccggcc |
| | | acatccggaaccagcggggcgactactcccacaccttctcccggaaggacctgcaggccgagctgatcctgctgttcgagaag |
| | | cagaaggagttcggcaacccccacgtgtccggcggcctgaaggagggcatcgagaccctgctgatgacccagcggcccgccct |
| | | gtccggcgacgccgtgcagaagatgctgggccactgcaccttcgagcccgccgagcccaaggccgccaagaacacctacaccg |
| | | ccgagcggttcatctggctgaccaagctgaacaacctgcggatcctggagcagggctccgagcggcccctgaccgacaccgag |
| | | cgggccaccctgatggacgagccctaccggaagtccaagctgacctacgcccaggcccggaagctgctgggcctggaggacac |
| | | cgccttcttcaagggcctgcggtacggcaaggacaacgccgaggcctccaccctgatggagatgaaggcctaccacgccatct |
| | | cccgggccctggagaaggagggcctgaaggacaagaagtcccccctgaacctgtcctccgagctgcaggacgagatcggcacc |
| | | gccttctccctgttcaagaccgacgaggacatcaccggccggctgaaggaccgggtgcagcccgagatcctggaggccctgct |
| | | gaagcacatctccttcgacaagttcgtgcagatctccctgaaggccctgcggcggatcgtgcccctgatggagcagggcaagc |
| | | ggtacgacgaggcctgcgccgagatctacggcgaccactacggcaagaagaacaccgaggagaagatctacctgccccccatc |
| | | cccgccgacgagatccggaaccccgtggtgctgcgggccctgtcccaggcccggaaggtgatcaacggcgtggtgcggcggta |
| | | cggctcccccgcccggatccacatcgagaccgcccgggaggtgggcaagtccttcaaggaccggaaggagatcgagaagcggc |
| | | aggaggagaaccggaaggaccgggagaaggccgccgccaagttccgggagtacttccccaacttcgtgggcgagcccaagtcc |
| | | aaggacatcctgaagctgcggctgtacgagcagcagcacggcaagtgcctgtactccggcaaggagatcaacctggtgcggct |
| | | gaacgagaagggctacgtggagatcgaccacgccctgcccttctcccggacctgggacgactccttcaacaacaaggtgctgg |
| | | tgctgggctccgagaaccagaacaagggcaaccagaccccctacgagtacttcaacggcaaggacaactcccgggagtggcag |
| | | gagttcaaggcccgggtggagacctcccggttcccccggtccaagaagcagcggatcctgctgcagaagttcgacgaggacgg |
| | | cttcaaggagtgcaacctgaacgacacccggtacgtgaaccggttcctgtgccagttcgtggccgaccacatcctgctgaccg |
| | | gcaagggcaagcggcgggtgttcgcctccaacggccagatcaccaacctgctgcggggcttctggggcctgcggaaggtgcgg |
| | | gccgagaacgaccggcaccacgccctggacgccgtggtggtggcctgctccaccgtggccatgcagcagaagatcacccggtt |
| | | cgtgcggtacaaggagatgaacgccttcgacggcaagaccatcgacaaggagaccggcaaggtgctgcaccagaagacccact |
| | | tcccccagccctgggagttcttcgcccaggaggtgatgatccgggtgttcggcaagcccgacggcaagcccgagttcgaggag |
| | | gccgacacccccgagaagctgcggaccctgctggccgagaagctgtcctcccggcccgaggccgtgcacgagtacgtgacccc |
| | | cctgttcgtgtcccgggcccccaaccggaagatgtccggcgcccacaaggacaccctgcggtccgccaagcggttcgtgaagc |
| | | acaacgagaagatctccgtgaagcgggtgtggctgaccgagatcaagctggccgacctggagaacatggtgaactacaagaac |
| | | ggccgggagatcgagctgtacgaggccctgaaggcccggctggaggcctacggcggcaacgccaagcaggccttcgaccccaa |
| | | ggacaaccccttctacaagaagggcggccagctggtgaaggccgtgcgggtggagaagacccaggagtccggcgtgctgctga |
| | | acaagaagaacgcctacaccatcgccgacaacggcgacatggtgcgggtggacgtgttctgcaaggtggacaagaagggcaag |
| | | aaccagtacttcatcgtgcccatctacgcctggcaggtggccgagaacatcctgcccgacatcgactgcaagggctaccggat |
| | | cgacgactcctacaccttctgcttctccctgcacaagtacgacctgatcgccttccagaaggacgagaagtccaaggtggagt |
| | | tcgcctactacatcaactgcgactcctccaacggccggttctacctggcctggcacgacaagggctccaaggagcagcagttc |
| | | cggatctccacccagaacctggtgctgatccagaagtaccaggtgaacgagctgggcaaggagatccggccctgccggctgaa |
| | | gaagcggccccccgtgcggtag |
| Open | 42 | ATGGACGGCTCCGGCGGCGGCTCCCCCAAGAAGAAGCGGAAGGTGGAGGACAAGCGGCCCGCCGCCACCAAGAAGGCCGGCCA |
| reading | | GGCCAAGAAGAAGAAGGGCGGCTCCGGCGGCGGCGAGGCCTCCCCCGCCTCCGGCCCCCGGCACCTGATGGACCCCCACATCT |
| frame for | | TCACCTCCAACTTCAACAACGGCATCGGCCGGCACAAGACCTACCTGTGCTACGAGGTGGAGCGGCTGGACAACGGCACCTCC |
| Nme2Cas9 | | GTGAAGATGGACCAGCACCGGGGCTTCCTGCACAACCAGGCCAAGAACCTGCTGTGCGGCTTCTACGGCCGGCACGCCGAGCT |
| base | | GCGGTTCCTGGACCTGGTGCCCTCCCTGCAGCTGGACCCCGCCCAGATCTACCGGGTGACCTGGTTCATCTCCTGGTCCCCCT |
| editor | | GCTTCTCCTGGGGCTGCGCCGGCGAGGTGCGGGCCTTCCTGCAGGAGAACACCCACGTGCGGCTGCGGATCTTCGCCGCCCGG |
| encoded | | ATCTACGACTACGACCCCCTGTACAAGGAGGCCCTGCAGATGCTGCGGGACGCCGGCGCCCAGGTGTCCATCATGACCTACGA |
| by mRNA R | | CGAGTTCAAGCACTGCTGGGACACCTTCGTGGACCACCAGGGCTGCCCCTTCCAGCCCTGGGACGGCCTGGACGAGCACTCCC |
| | | AGGCCCTGTCCGGCCGGCTGCGGGCCATCCTGCAGAACCAGGGCAACTCCGGCTCCGAGACCCCCGGCACCTCCGAGTCCGCC |
| | | ACCCCCGAGTCCGCAGCGTTCAAACCAAATcccatcaactacatcctgggcctggccatcggcatcgcctccgtgggctgggc |
| | | catggtggagatcgacgaggaggagaaccccatccggctgatcgacctgggcgtgcgggtgttcgagcgggccgaggtgccca |
| | | agaccggcgactccctggccatggcccggcggctggcccggtccgtgcggcggctgacccggcggcgggcccaccggctgctg |
| | | cgggcccggcggctgctgaagcgggagggcgtgctgcaggccgccgacttcgacgagaacggcctgatcaagtccctgcccaa |
| | | caccccctggcagctgcgggccgccgccctggaccggaagctgacccccctggagtggtccgccgtgctgctgcacctgatca |
| | | agcaccggggctacctgtcccagcggaagaacgagggcgagaccgccgacaaggagctgggcgccctgctgaagggcgtggcc |
| | | aacaacgcccacgccctgcagaccggcgacttccggacccccgccgagctggccctgaacaagttcgagaaggagtccggcca |
| | | catccggaaccagcggggcgactactcccacaccttctcccggaaggacctgcaggccgagctgatcctgctgttcgagaagc |
| | | agaaggagttcggcaacccccacgtgtccggcggcctgaaggagggcatcgagaccctgctgatgacccagcggcccgccctg |
| | | tccggcgacgccgtgcagaagatgctgggccactgcaccttcgagcccgccgagcccaaggccgccaagaacacctacaccgc |
| | | cgagcggttcatctggctgaccaagctgaacaacctgcggatcctggagcagggctccgagcggcccctgaccgacaccgagc |
| | | gggccaccctgatggacgagccctaccggaagtccaagctgacctacgcccaggcccggaagctgctgggcctggaggacacc |
| | | gccttcttcaagggcctgcggtacggcaaggacaacgccgaggcctccaccctgatggagatgaaggcctaccacgccatctc |
| | | ccgggccctggagaaggagggcctgaaggacaagaagtcccccctgaacctgtcctccgagctgcaggacgagatcggcaccg |
| | | ccttctccctgttcaagaccgacgaggacatcaccggccggctgaaggaccgggtgcagcccgagatcctggaggccctgctg |
| | | aagcacatctccttcgacaagttcgtgcagatctccctgaaggccctgcggcggatcgtgcccctgatggagcagggcaagcg |
| | | gtacgacgaggcctgcgccgagatctacggcgaccactacggcaagaagaacaccgaggagaagatctacctgccccccatcc |
| | | ccgccgacgagatccggaaccccgtggtgctgcgggccctgtcccaggcccggaaggtgatcaacggcgtggtgcggcggtac |
| | | ggctcccccgcccggatccacatcgagaccgcccgggaggtgggcaagtccttcaaggaccggaaggagatcgagaagcggca |
| | | ggaggagaaccggaaggaccgggagaaggccgccgccaagttccgggagtacttccccaacttcgtgggcgagcccaagtcca |
| | | aggacatcctgaagctgcggctgtacgagcagcagcacggcaagtgcctgtactccggcaaggagatcaacctggtgcggctg |
| | | aacgagaagggctacgtggagatcgaccacgccctgcccttctcccggacctgggacgactccttcaacaacaaggtgctggt |
| | | gctgggctccgagaaccagaacaagggcaaccagaccccctacgagtacttcaacggcaaggacaactcccgggagtggcagg |
| | | agttcaaggcccgggtggagacctcccggttcccccggtccaagaagcagcggatcctgctgcagaagttcgacgaggacggc |
| | | ttcaaggagtgcaacctgaacgacacccggtacgtgaaccgcttcctgtgccagttcgtggccgaccacatcctgctgaccgg |
| | | caagggcaagcggcgggtgttcgcctccaacggccagatcaccaacctgctgcggggcttctggggcctgcggaaggtgcggg |
| | | ccgagaacgaccggcaccacgccctggacgccgtggtggtggcctgctccaccgtggccatgcagcagaagatcacccggttc |
| | | gtgcggtacaaggagatgaacgccttcgacggcaagaccatcgacaaggagaccggcaaggtgctgcaccagaagacccactt |
| | | cccccagccctgggagttcttcgcccaggaggtgatgatccgggtgttcggcaagcccgacggcaagcccgagttcgaggagg |
| | | ccgacacccccgagaagctgcggaccctgctggccgagaagctgtcctcccggcccgaggccgtgcacgagtacgtgaccccc |
| | | ctgttcgtgtcccgggcccccaaccggaagatgtccggcgcccacaaggacaccctgcggtccgccaagcggttcgtgaagca |
| | | caacgagaagatctccgtgaagcgggtgtggctgaccgagatcaagctggccgacctggagaacatggtgaactacaagaacg |
| | | gccgggagatcgagctgtacgaggccctgaaggcccggctggaggcctacggcggcaacgccaagcaggccttcgaccccaag |
| | | gacaaccccttctacaagaagggcggccagctggtgaaggccgtgcgggtggagaagacccaggagtccggcgtgctgctgaa |
| | | caagaagaacgcctacaccatcgccgacaacggcgacatggtgcgggtggacgtgttctgcaaggtggacaagaagggcaaga |
| | | accagtacttcatcgtgcccatctacgcctggcaggtggccgagaacatcctgcccgacatcgactgcaagggctaccggatc |
| | | gacgactcctacaccttctgcttctccctgcacaagtacgacctgatcgccttccagaaggacgagaagtccaaggtggagtt |
| | | cgcctactacatcaactgcgactcctccaacggccggttctacctggcctggcacgacaagggctccaaggagcagcagttcc |
| | | ggatctccacccagaacctggtgctgatccagaagtaccaggtgaacgagctgggcaaggagatccggccctgccggctgaag |
| | | aagcggccccccgtgcggtag |
| ORF | 43 | ATGGACAAGAAGTACAGCATCGGACTGGACATCGGAACAAACAGCGTCGGATGGGCAGTCATCACAGACGAATACAAGGTCCC |
| encoding | | GAGCAAGAAGTTCAAGGTCCTGGGAAACACAGACAGACACAGCATCAAGAAGAACCTGATCGGAGCACTGCTGTTCGACAGCG |
| Sp. Cas9 | | GAGAAACAGCAGAAGCAACAAGACTGAAGAGAACAGCAAGAAGAAGATACACAAGAAGAAAGAACAGAATCTGCTACCTGCAG |
| | | GAAATCTTCAGCAACGAAATGGCAAAGGTCGACGACAGCTTCTTCCACAGACTGGAAGAAAGCTTCCTGGTCGAAGAAGACAA |
| | | GAAGCACGAAAGACACCCGATCTTCGGAAACATCGTCGACGAAGTCGCATACCACGAAAAGTACCCGACAATCTACCACCTGA |
| | | GAAAGAAGCTGGTCGACAGCACAGACAAGGCAGACCTGAGACTGATCTACCTGGCACTGGCACACATGATCAAGTTCAGAGGA |
| | | CACTTCCTGATCGAAGGAGACCTGAACCCGGACAACAGCGACGTCGACAAGCTGTTCATCCAGCTGGTCCAGACATACAACCA |
| | | GCTGTTCGAAGAAAACCCGATCAACGCAAGCGGAGTCGACGCAAAGGCAATCCTGAGCGCAAGACTGAGCAAGAGCAGAAGAC |
| | | TGGAAAACCTGATCGCACAGCTGCCGGGAGAAAAGAAGAACGGACTGTTCGGAAACCTGATCGCACTGAGCCTGGGACTGACA |
| | | CCGAACTTCAAGAGCAACTTCGACCTGGCAGAAGACGCAAAGCTGCAGCTGAGCAAGGACACATACGACGACGACCTGGACAA |
| | | CCTGCTGGCACAGATCGGAGACCAGTACGCAGACCTGTTCCTGGCAGCAAAGAACCTGAGCGACGCAATCCTGCTGAGCGACA |
| | | TCCTGAGAGTCAACACAGAAATCACAAAGGCACCGCTGAGCGCAAGCATGATCAAGAGATACGACGAACACCACCAGGACCTG |
| | | ACACTGCTGAAGGCACTGGTCAGACAGCAGCTGCCGGAAAAGTACAAGGAAATCTTCTTCGACCAGAGCAAGAACGGATACGC |
| | | AGGATACATCGACGGAGGAGCAAGCCAGGAAGAATTCTACAAGTTCATCAAGCCGATCCTGGAAAAGATGGACGGAACAGAAG |
| | | AACTGCTGGTCAAGCTGAACAGAGAAGACCTGCTGAGAAAGCAGAGAACATTCGACAACGGAAGCATCCCGCACCAGATCCAC |
| | | CTGGGAGAACTGCACGCAATCCTGAGAAGACAGGAAGACTTCTACCCGTTCCTGAAGGACAACAGAGAAAAGATCGAAAAGAT |
| | | CCTGACATTCAGAATCCCGTACTACGTCGGACCGCTGGCAAGAGGAAACAGCAGATTCGCATGGATGACAAGAAAGAGCGAAG |
| | | AAACAATCACACCGTGGAACTTCGAAGAAGTCGTCGACAAGGGAGCAAGCGCACAGAGCTTCATCGAAAGAATGACAAACTTC |
| | | GACAAGAACCTGCCGAACGAAAAGGTCCTGCCGAAGCACAGCCTGCTGTACGAATACTTCACAGTCTACAACGAACTGACAAA |
| | | GGTCAAGTACGTCACAGAAGGAATGAGAAAGCCGGCATTCCTGAGCGGAGAACAGAAGAAGGCAATCGTCGACCTGCTGTTCA |
| | | AGACAAACAGAAAGGTCACAGTCAAGCAGCTGAAGGAAGACTACTTCAAGAAGATCGAATGCTTCGACAGCGTCGAAATCAGC |
| | | GGAGTCGAAGACAGATTCAACGCAAGCCTGGGAACATACCACGACCTGCTGAAGATCATCAAGGACAAGGACTTCCTGGACAA |
| | | CGAAGAAAACGAAGACATCCTGGAAGACATCGTCCTGACACTGACACTGTTCGAAGACAGAGAAATGATCGAAGAAAGACTGA |
| | | AGACATACGCACACCTGTTCGACGACAAGGTCATGAAGCAGCTGAAGAGAAGAAGATACACAGGATGGGGAAGACTGAGCAGA |
| | | AAGCTGATCAACGGAATCAGAGACAAGCAGAGCGGAAAGACAATCCTGGACTTCCTGAAGAGCGACGGATTCGCAAACAGAAA |
| | | CTTCATGCAGCTGATCCACGACGACAGCCTGACATTCAAGGAAGACATCCAGAAGGCACAGGTCAGCGGACAGGGAGACAGCC |
| | | TGCACGAACACATCGCAAACCTGGCAGGAAGCCCGGCAATCAAGAAGGGAATCCTGCAGACAGTCAAGGTCGTCGACGAACTG |
| | | GTCAAGGTCATGGGAAGACACAAGCCGGAAAACATCGTCATCGAAATGGCAAGAGAAAACCAGACAACACAGAAGGGACAGAA |
| | | GAACAGCAGAGAAAGAATGAAGAGAATCGAAGAAGGAATCAAGGAACTGGGAAGCCAGATCCTGAAGGAACACCCGGTCGAAA |
| | | ACACACAGCTGCAGAACGAAAAGCTGTACCTGTACTACCTGCAGAACGGAAGAGACATGTACGTCGACCAGGAACTGGACATC |
| | | AACAGACTGAGCGACTACGACGTCGACCACATCGTCCCGCAGAGCTTCCTGAAGGACGACAGCATCGACAACAAGGTCCTGAC |
| | | AAGAAGCGACAAGAACAGAGGAAAGAGCGACAACGTCCCGAGCGAAGAAGTCGTCAAGAAGATGAAGAACTACTGGAGACAGC |
| | | TGCTGAACGCAAAGCTGATCACACAGAGAAAGTTCGACAACCTGACAAAGGCAGAGAGAGGAGGACTGAGCGAACTGGACAAG |
| | | GCAGGATTCATCAAGAGACAGCTGGTCGAAACAAGACAGATCACAAAGCACGTCGCACAGATCCTGGACAGCAGAATGAACAC |
| | | AAAGTACGACGAAAACGACAAGCTGATCAGAGAAGTCAAGGTCATCACACTGAAGAGCAAGCTGGTCAGCGACTTCAGAAAGG |
| | | ACTTCCAGTTCTACAAGGTCAGAGAAATCAACAACTACCACCACGCACACGACGCATACCTGAACGCAGTCGTCGGAACAGCA |
| | | CTGATCAAGAAGTACCCGAAGCTGGAAAGCGAATTCGTCTACGGAGACTACAAGGTCTACGACGTCAGAAAGATGATCGCAAA |
| | | GAGCGAACAGGAAATCGGAAAGGCAACAGCAAAGTACTTCTTCTACAGCAACATCATGAACTTCTTCAAGACAGAAATCACAC |
| | | TGGCAAACGGAGAAATCAGAAAGAGACCGCTGATCGAAACAAACGGAGAAACAGGAGAAATCGTCTGGGACAAGGGAAGAGAC |
| | | TTCGCAACAGTCAGAAAGGTCCTGAGCATGCCGCAGGTCAACATCGTCAAGAAGACAGAAGTCCAGACAGGAGGATTCAGCAA |
| | | GGAAAGCATCCTGCCGAAGAGAAACAGCGACAAGCTGATCGCAAGAAAGAAGGACTGGGACCCGAAGAAGTACGGAGGATTCG |
| | | ACAGCCCGACAGTCGCATACAGCGTCCTGGTCGTCGCAAAGGTCGAAAAGGGAAAGAGCAAGAAGCTGAAGAGCGTCAAGGAA |
| | | CTGCTGGGAATCACAATCATGGAAAGAAGCAGCTTCGAAAAGAACCCGATCGACTTCCTGGAAGCAAAGGGATACAAGGAAGT |
| | | CAAGAAGGACCTGATCATCAAGCTGCCGAAGTACAGCCTGTTCGAACTGGAAAACGGAAGAAAGAGAATGCTGGCAAGCGCAG |
| | | GAGAACTGCAGAAGGGAAACGAACTGGCACTGCCGAGCAAGTACGTCAACTTCCTGTACCTGGCAAGCCACTACGAAAAGCTG |
| | | AAGGGAAGCCCGGAAGACAACGAACAGAAGCAGCTGTTCGTCGAACAGCACAAGCACTACCTGGACGAAATCATCGAACAGAT |
| | | CAGCGAATTCAGCAAGAGAGTCATCCTGGCAGACGCAAACCTGGACAAGGTCCTGAGCGCATACAACAAGCACAGAGACAAGC |
| | | CGATCAGAGAACAGGCAGAAAACATCATCCACCTGTTCACACTGACAAACCTGGGAGCACCGGCAGCATTCAAGTACTTCGAC |
| | | ACAACAATCGACAGAAAGAGATACACAAGCACAAAGGAAGTCCTGGACGCAACACTGATCCACCAGAGCATCACAGGACTGTA |
| | | CGAAACAAGAATCGACCTGAGCCAGCTGGGAGGAGACGGAGGAGGAAGCCCGAAGAAGAAGAGAAAGGTCTAG |
| ORF | 44 | ATGGACAAGAAGTACTCCATCGGCCTGGACATCGGCACCAACTCCGTGGGCTGGGCCGTGATCACCGACGAGTACAAGGTGCC |
| encoding | | CTCCAAGAAGTTCAAGGTGCTGGGCAACACCGACCGGCACTCCATCAAGAAGAACCTGATCGGCGCCCTGCTGTTCGACTCCG |
| Sp. Cas9 | | GCGAGACCGCCGAGGCCACCCGGCTGAAGCGGACCGCCCGGCGGCGGTACACCCGGCGGAAGAACCGGATCTGCTACCTGCAG |
| | | GAGATCTTCTCCAACGAGATGGCCAAGGTGGACGACTCCTTCTTCCACCGGCTGGAGGAGTCCTTCCTGGTGGAGGAGGACAA |
| | | GAAGCACGAGCGGCACCCCATCTTCGGCAACATCGTGGACGAGGTGGCCTACCACGAGAAGTACCCCACCATCTACCACCTGC |
| | | GGAAGAAGCTGGTGGACTCCACCGACAAGGCCGACCTGCGGCTGATCTACCTGGCCCTGGCCCACATGATCAAGTTCCGGGGC |
| | | CACTTCCTGATCGAGGGCGACCTGAACCCCGACAACTCCGACGTGGACAAGCTGTTCATCCAGCTGGTGCAGACCTACAACCA |
| | | GCTGTTCGAGGAGAACCCCATCAACGCCTCCGGCGTGGACGCCAAGGCCATCCTGTCCGCCCGGCTGTCCAAGTCCCGGCGGC |
| | | TGGAGAACCTGATCGCCCAGCTGCCCGGCGAGAAGAAGAACGGCCTGTTCGGCAACCTGATCGCCCTGTCCCTGGGCCTGACC |
| | | CCCAACTTCAAGTCCAACTTCGACCTGGCCGAGGACGCCAAGCTGCAGCTGTCCAAGGACACCTACGACGACGACCTGGACAA |
| | | CCTGCTGGCCCAGATCGGCGACCAGTACGCCGACCTGTTCCTGGCCGCCAAGAACCTGTCCGACGCCATCCTGCTGTCCGACA |
| | | TCCTGCGGGTGAACACCGAGATCACCAAGGCCCCCCTGTCCGCCTCCATGATCAAGCGGTACGACGAGCACCACCAGGACCTG |
| | | ACCCTGCTGAAGGCCCTGGTGCGGCAGCAGCTGCCCGAGAAGTACAAGGAGATCTTCTTCGACCAGTCCAAGAACGGCTACGC |
| | | CGGCTACATCGACGGCGGCGCCTCCCAGGAGGAGTTCTACAAGTTCATCAAGCCCATCCTGGAGAAGATGGACGGCACCGAGG |
| | | AGCTGCTGGTGAAGCTGAACCGGGAGGACCTGCTGCGGAAGCAGCGGACCTTCGACAACGGCTCCATCCCCCACCAGATCCAC |
| | | CTGGGCGAGCTGCACGCCATCCTGCGGCGGCAGGAGGACTTCTACCCCTTCCTGAAGGACAACCGGGAGAAGATCGAGAAGAT |
| | | CCTGACCTTCCGGATCCCCTACTACGTGGGCCCCCTGGCCCGGGGCAACTCCCGGTTCGCCTGGATGACCCGGAAGTCCGAGG |
| | | AGACCATCACCCCCTGGAACTTCGAGGAGGTGGTGGACAAGGGCGCCTCCGCCCAGTCCTTCATCGAGCGGATGACCAACTTC |
| | | GACAAGAACCTGCCCAACGAGAAGGTGCTGCCCAAGCACTCCCTGCTGTACGAGTACTTCACCGTGTACAACGAGCTGACCAA |
| | | GGTGAAGTACGTGACCGAGGGCATGCGGAAGCCCGCCTTCCTGTCCGGCGAGCAGAAGAAGGCCATCGTGGACCTGCTGTTCA |
| | | AGACCAACCGGAAGGTGACCGTGAAGCAGCTGAAGGAGGACTACTTCAAGAAGATCGAGTGCTTCGACTCCGTGGAGATCTCC |
| | | GGCGTGGAGGACCGGTTCAACGCCTCCCTGGGCACCTACCACGACCTGCTGAAGATCATCAAGGACAAGGACTTCCTGGACAA |
| | | CGAGGAGAACGAGGACATCCTGGAGGACATCGTGCTGACCCTGACCCTGTTCGAGGACCGGGAGATGATCGAGGAGCGGCTGA |
| | | AGACCTACGCCCACCTGTTCGACGACAAGGTGATGAAGCAGCTGAAGCGGCGGCGGTACACCGGCTGGGGCCGGCTGTCCCGG |
| | | AAGCTGATCAACGGCATCCGGGACAAGCAGTCCGGCAAGACCATCCTGGACTTCCTGAAGTCCGACGGCTTCGCCAACCGGAA |
| | | CTTCATGCAGCTGATCCACGACGACTCCCTGACCTTCAAGGAGGACATCCAGAAGGCCCAGGTGTCCGGCCAGGGCGACTCCC |
| | | TGCACGAGCACATCGCCAACCTGGCCGGCTCCCCCGCCATCAAGAAGGGCATCCTGCAGACCGTGAAGGTGGTGGACGAGCTG |
| | | GTGAAGGTGATGGGCCGGCACAAGCCCGAGAACATCGTGATCGAGATGGCCCGGGAGAACCAGACCACCCAGAAGGGCCAGAA |
| | | GAACTCCCGGGAGCGGATGAAGCGGATCGAGGAGGGCATCAAGGAGCTGGGCTCCCAGATCCTGAAGGAGCACCCCGTGGAGA |
| | | ACACCCAGCTGCAGAACGAGAAGCTGTACCTGTACTACCTGCAGAACGGCCGGGACATGTACGTGGACCAGGAGCTGGACATC |
| | | AACCGGCTGTCCGACTACGACGTGGACCACATCGTGCCCCAGTCCTTCCTGAAGGACGACTCCATCGACAACAAGGTGCTGAC |
| | | CCGGTCCGACAAGAACCGGGGCAAGTCCGACAACGTGCCCTCCGAGGAGGTGGTGAAGAAGATGAAGAACTACTGGCGGCAGC |
| | | TGCTGAACGCCAAGCTGATCACCCAGCGGAAGTTCGACAACCTGACCAAGGCCGAGCGGGGCGGCCTGTCCGAGCTGGACAAG |
| | | GCCGGCTTCATCAAGCGGCAGCTGGTGGAGACCCGGCAGATCACCAAGCACGTGGCCCAGATCCTGGACTCCCGGATGAACAC |
| | | CAAGTACGACGAGAACGACAAGCTGATCCGGGAGGTGAAGGTGATCACCCTGAAGTCCAAGCTGGTGTCCGACTTCCGGAAGG |
| | | ACTTCCAGTTCTACAAGGTGCGGGAGATCAACAACTACCACCACGCCCACGACGCCTACCTGAACGCCGTGGTGGGCACCGCC |
| | | CTGATCAAGAAGTACCCCAAGCTGGAGTCCGAGTTCGTGTACGGCGACTACAAGGTGTACGACGTGCGGAAGATGATCGCCAA |
| | | GTCCGAGCAGGAGATCGGCAAGGCCACCGCCAAGTACTTCTTCTACTCCAACATCATGAACTTCTTCAAGACCGAGATCACCC |
| | | TGGCCAACGGCGAGATCCGGAAGCGGCCCCTGATCGAGACCAACGGCGAGACCGGCGAGATCGTGTGGGACAAGGGCCGGGAC |
| | | TTCGCCACCGTGCGGAAGGTGCTGTCCATGCCCCAGGTGAACATCGTGAAGAAGACCGAGGTGCAGACCGGCGGCTTCTCCAA |
| | | GGAGTCCATCCTGCCCAAGCGGAACTCCGACAAGCTGATCGCCCGGAAGAAGGACTGGGACCCCAAGAAGTACGGCGGCTTCG |
| | | ACTCCCCCACCGTGGCCTACTCCGTGCTGGTGGTGGCCAAGGTGGAGAAGGGCAAGTCCAAGAAGCTGAAGTCCGTGAAGGAG |
| | | CTGCTGGGCATCACCATCATGGAGCGGTCCTCCTTCGAGAAGAACCCCATCGACTTCCTGGAGGCCAAGGGCTACAAGGAGGT |
| | | GAAGAAGGACCTGATCATCAAGCTGCCCAAGTACTCCCTGTTCGAGCTGGAGAACGGCCGGAAGCGGATGCTGGCCTCCGCCG |
| | | GCGAGCTGCAGAAGGGCAACGAGCTGGCCCTGCCCTCCAAGTACGTGAACTTCCTGTACCTGGCCTCCCACTACGAGAAGCTG |
| | | AAGGGCTCCCCCGAGGACAACGAGCAGAAGCAGCTGTTCGTGGAGCAGCACAAGCACTACCTGGACGAGATCATCGAGCAGAT |
| | | CTCCGAGTTCTCCAAGCGGGTGATCCTGGCCGACGCCAACCTGGACAAGGTGCTGTCCGCCTACAACAAGCACCGGGACAAGC |
| | | CCATCCGGGAGCAGGCCGAGAACATCATCCACCTGTTCACCCTGACCAACCTGGGCGCCCCCGCCGCCTTCAAGTACTTCGAC |
| | | ACCACCATCGACCGGAAGCGGTACACCTCCACCAAGGAGGTGCTGGACGCCACCCTGATCCACCAGTCCATCACCGGCCTGTA |
| | | CGAGACCCGGATCGACCTGTCCCAGCTGGGCGGCGACGGCGGCGGCTCCCCCAAGAAGAAGCGGAAGGTGTGA |
| ORF | 45 | AUGGACAAGAAGUACAGCAUCGGCCUGGACAUCGGCACGAACAGCGUUGGCUGGGCUGUGAUCACGGACGAGUACAAGGUUCC |
| encoding | | CUCAAAGAAGUUCAAGGUGCUGGGCAACACGGACCGGCACAGCAUCAAGAAGAAUCUCAUCGGUGCACUGCUGUUCGACAGCG |
| Sp. Cas9 | | GUGAGACGGCCGAAGCCACGCGGCUGAAGCGGACGGCCCGCCGGCGGUACACGCGGCGGAAGAACCGGAUCUGCUACCUGCAG |
| | | GAGAUCUUCAGCAACGAGAUGGCCAAGGUGGACGACAGCUUCUUCCACCGGCUGGAGGAGAGCUUCCUGGUGGAGGAGGACAA |
| | | GAAGCACGAGCGGCACCCCAUCUUCGGCAACAUCGUGGACGAAGUCGCCUACCACGAGAAGUACCCCACCAUCUACCACCUGC |
| | | GGAAGAAGCUGGUGGACUCGACUGACAAGGCCGACCUGCGGCUGAUCUACCUGGCACUGGCCCACAUGAUAAAGUUCCGGGGC |
| | | CACUUCCUGAUCGAGGGCGACCUGAACCCUGACAACAGCGACGUGGACAAGCUGUUCAUCCAGCUGGUGCAGACCUACAACCA |
| | | GCUGUUCGAGGAGAACCCCAUCAACGCCAGCGGCGUGGACGCCAAGGCCAUCCUCAGCGCCCGCCUCAGCAAGAGCCGGCGGC |
| | | UGGAGAAUCUCAUCGCCCAGCUUCCAGGUGAGAAGAAGAAUGGGCUGUUCGGCAAUCUCAUCGCACUCAGCCUGGGCCUGACU |
| | | CCCAACUUCAAGAGCAACUUCGACCUGGCCGAGGACGCCAAGCUGCAGCUCAGCAAGGACACCUACGACGACGACCUGGACAA |
| | | UCUCCUGGCCCAGAUCGGCGACCAGUACGCCGACCUGUUCCUGGCUGCCAAGAAUCUCAGCGACGCCAUCCUGCUCAGCGACA |
| | | UCCUGCGGGUGAACACAGAGAUCACGAAGGCCCCCCUCAGCGCCAGCAUGAUAAAGCGGUACGACGAGCACCACCAGGACCUG |
| | | ACGCUGCUGAAGGCACUGGUGCGGCAGCAGCUUCCAGAGAAGUACAAGGAGAUCUUCUUCGACCAGAGCAAGAAUGGGUACGC |
| | | CGGGUACAUCGACGGUGGUGCCAGCCAGGAGGAGUUCUACAAGUUCAUCAAGCCCAUCCUGGAGAAGAUGGACGGCACAGAGG |
| | | AGCUGCUGGUGAAGCUGAACAGGGAGGACCUGCUGCGGAAGCAGCGGACGUUCGACAAUGGGAGCAUCCCCCACCAGAUCCAC |
| | | CUGGGUGAGCUGCACGCCAUCCUGCGGCGGCAGGAGGACUUCUACCCCUUCCUGAAGGACAACAGGGAGAAGAUCGAGAAGAU |
| | | CCUGACGUUCCGGAUCCCCUACUACGUUGGCCCCCUGGCCCGCGGCAACAGCCGGUUCGCCUGGAUGACGCGGAAGAGCGAGG |
| | | AGACGAUCACUCCCUGGAACUUCGAGGAAGUCGUGGACAAGGGUGCCAGCGCCCAGAGCUUCAUCGAGCGGAUGACGAACUUC |
| | | GACAAGAAUCUUCCAAACGAGAAGGUGCUUCCAAAGCACAGCCUGCUGUACGAGUACUUCACGGUGUACAACGAGCUGACGAA |
| | | GGUGAAGUACGUGACAGAGGGCAUGCGGAAGCCCGCCUUCCUCAGCGGUGAGCAGAAGAAGGCCAUCGUGGACCUGCUGUUCA |
| | | AGACGAACCGGAAGGUGACGGUGAAGCAGCUGAAGGAGGACUACUUCAAGAAGAUCGAGUGCUUCGACAGCGUGGAGAUCAGC |
| | | GGCGUGGAGGACCGGUUCAACGCCAGCCUGGGCACCUACCACGACCUGCUGAAGAUCAUCAAGGACAAGGACUUCCUGGACAA |
| | | CGAGGAGAACGAGGACAUCCUGGAGGACAUCGUGCUGACGCUGACGCUGUUCGAGGACAGGGAGAUGAUAGAGGAGCGGCUGA |
| | | AGACCUACGCCCACCUGUUCGACGACAAGGUGAUGAAGCAGCUGAAGCGGCGGCGGUACACGGGCUGGGGCCGGCUCAGCCGG |
| | | AAGCUGAUCAAUGGGAUCCGAGACAAGCAGAGCGGCAAGACGAUCCUGGACUUCCUGAAGAGCGACGGCUUCGCCAACCGGAA |
| | | CUUCAUGCAGCUGAUCCACGACGACAGCCUGACGUUCAAGGAGGACAUCCAGAAGGCCCAGGUCAGCGGCCAGGGCGACAGCC |
| | | UGCACGAGCACAUCGCCAAUCUCGCCGGGAGCCCCGCCAUCAAGAAGGGGAUCCUGCAGACGGUGAAGGUGGUGGACGAGCUG |
| | | GUGAAGGUGAUGGGCCGGCACAAGCCAGAGAACAUCGUGAUCGAGAUGGCCAGGGAGAACCAGACGACUCAAAAGGGGCAGAA |
| | | GAACAGCAGGGAGCGGAUGAAGCGGAUCGAGGAGGGCAUCAAGGAGCUGGGCAGCCAGAUCCUGAAGGAGCACCCCGUGGAGA |
| | | ACACUCAACUGCAGAACGAGAAGCUGUACCUGUACUACCUGCAGAAUGGGCGAGACAUGUACGUGGACCAGGAGCUGGACAUC |
| | | AACCGGCUCAGCGACUACGACGUGGACCACAUCGUUCCCCAGAGCUUCCUGAAGGACGACAGCAUCGACAACAAGGUGCUGAC |
| | | GCGGAGCGACAAGAACCGGGGCAAGAGCGACAACGUUCCCUCAGAGGAAGUCGUGAAGAAGAUGAAGAACUACUGGCGGCAGC |
| | | UGCUGAACGCCAAGCUGAUCACUCAACGGAAGUUCGACAAUCUCACGAAGGCCGAGCGGGGUGGCCUCAGCGAGCUGGACAAG |
| | | GCCGGGUUCAUCAAGCGGCAGCUGGUGGAGACGCGGCAGAUCACGAAGCACGUGGCCCAGAUCCUGGACAGCCGGAUGAACAC |
| | | GAAGUACGACGAGAACGACAAGCUGAUCAGGGAAGUCAAGGUGAUCACGCUGAAGAGCAAGCUGGUCAGCGACUUCCGGAAGG |
| | | ACUUCCAGUUCUACAAGGUGAGGGAGAUCAACAACUACCACCACGCCCACGACGCCUACCUGAACGCUGUGGUUGGCACGGCA |
| | | CUGAUCAAGAAGUACCCCAAGCUGGAGAGCGAGUUCGUGUACGGCGACUACAAGGUGUACGACGUGCGGAAGAUGAUAGCCAA |
| | | GAGCGAGCAGGAGAUCGGCAAGGCCACGGCCAAGUACUUCUUCUACAGCAACAUCAUGAACUUCUUCAAGACAGAGAUCACGC |
| | | UGGCCAAUGGUGAGAUCCGGAAGCGGCCCCUGAUCGAGACGAAUGGUGAGACGGGUGAGAUCGUGUGGGACAAGGGGCGAGAC |
| | | UUCGCCACGGUGCGGAAGGUGCUCAGCAUGCCCCAGGUGAACAUCGUGAAGAAGACAGAAGUCCAGACGGGUGGCUUCAGCAA |
| | | GGAGAGCAUCCUUCCAAAGCGGAACAGCGACAAGCUGAUCGCCCGCAAGAAGGACUGGGACCCCAAGAAGUACGGUGGCUUCG |
| | | ACAGCCCCACCGUGGCCUACAGCGUGCUGGUGGUGGCCAAGGUGGAGAAGGGGAAGAGCAAGAAGCUGAAGAGCGUGAAGGAG |
| | | CUGCUGGGCAUCACGAUCAUGGAGCGGAGCAGCUUCGAGAAGAACCCCAUCGACUUCCUGGAAGCCAAGGGGUACAAGGAAGU |
| | | CAAGAAGGACCUGAUCAUCAAGCUUCCAAAGUACAGCCUGUUCGAGCUGGAGAAUGGGCGGAAGCGGAUGCUGGCCAGCGCCG |
| | | GUGAGCUGCAGAAGGGGAACGAGCUGGCACUUCCCUCAAAGUACGUGAACUUCCUGUACCUGGCCAGCCACUACGAGAAGCUG |
| | | AAGGGGAGCCCAGAGGACAACGAGCAGAAGCAGCUGUUCGUGGAGCAGCACAAGCACUACCUGGACGAGAUCAUCGAGCAGAU |
| | | CAGCGAGUUCAGCAAGCGGGUGAUCCUGGCCGACGCCAAUCUCGACAAGGUGCUCAGCGCCUACAACAAGCACCGAGACAAGC |
| | | CCAUCAGGGAGCAGGCCGAGAACAUCAUCCACCUGUUCACGCUGACGAAUCUCGGUGCCCCCGCUGCCUUCAAGUACUUCGAC |
| | | ACGACGAUCGACCGGAAGCGGUACACGUCGACUAAGGAAGUCCUGGACGCCACGCUGAUCCACCAGAGCAUCACGGGCCUGUA |
| | | CGAGACGCGGAUCGACCUCAGCCAGCUGGGUGGCGACGGUGGUGGCAGCCCCAAGAAGAAGCGGAAGGUGUAG |
| ORF | 46 | AUGGACAAGAAGUACAGCAUCGGCCUCGACAUCGGCACCAACAGCGUCGGCUGGGCCGUCAUCACCGACGAGUACAAGGUCCC |
| encoding | | CAGCAAGAAGUUCAAGGUCCUCGGCAACACCGACCGCCACAGCAUCAAGAAGAACCUCAUCGGCGCCCUCCUCUUCGACAGCG |
| Sp. Cas9 | | GCGAGACCGCCGAGGCCACCCGCCUCAAGCGCACCGCCCGCCGCCGCUACACCCGCCGCAAGAACCGCAUCUGCUACCUCCAG |
| | | GAGAUCUUCAGCAACGAGAUGGCCAAGGUCGACGACAGCUUCUUCCACCGCCUCGAGGAGAGCUUCCUCGUCGAGGAGGACAA |
| | | GAAGCACGAGCGCCACCCCAUCUUCGGCAACAUCGUCGACGAGGUCGCCUACCACGAGAAGUACCCCACCAUCUACCACCUCC |
| | | GCAAGAAGCUCGUCGACAGCACCGACAAGGCCGACCUCCGCCUCAUCUACCUCGCCCUCGCCCACAUGAUCAAGUUCCGCGGC |
| | | CACUUCCUCAUCGAGGGCGACCUCAACCCCGACAACAGCGACGUCGACAAGCUCUUCAUCCAGCUCGUCCAGACCUACAACCA |
| | | GCUCUUCGAGGAGAACCCCAUCAACGCCAGCGGCGUCGACGCCAAGGCCAUCCUCAGCGCCCGCCUCAGCAAGAGCCGCCGCC |
| | | UCGAGAACCUCAUCGCCCAGCUCCCCGGCGAGAAGAAGAACGGCCUCUUCGGCAACCUCAUCGCCCUCAGCCUCGGCCUCACC |
| | | CCCAACUUCAAGAGCAACUUCGACCUCGCCGAGGACGCCAAGCUCCAGCUCAGCAAGGACACCUACGACGACGACCUCGACAA |
| | | CCUCCUCGCCCAGAUCGGCGACCAGUACGCCGACCUCUUCCUCGCCGCCAAGAACCUCAGCGACGCCAUCCUCCUCAGCGACA |
| | | UCCUCCGCGUCAACACCGAGAUCACCAAGGCCCCCCUCAGCGCCAGCAUGAUCAAGCGCUACGACGAGCACCACCAGGACCUC |
| | | ACCCUCCUCAAGGCCCUCGUCCGCCAGCAGCUCCCCGAGAAGUACAAGGAGAUCUUCUUCGACCAGAGCAAGAACGGCUACGC |
| | | CGGCUACAUCGACGGCGGCGCCAGCCAGGAGGAGUUCUACAAGUUCAUCAAGCCCAUCCUCGAGAAGAUGGACGGCACCGAGG |
| | | AGCUCCUCGUCAAGCUCAACCGCGAGGACCUCCUCCGCAAGCAGCGCACCUUCGACAACGGCAGCAUCCCCCACCAGAUCCAC |
| | | CUCGGCGAGCUCCACGCCAUCCUCCGCCGCCAGGAGGACUUCUACCCCUUCCUCAAGGACAACCGCGAGAAGAUCGAGAAGAU |
| | | CCUCACCUUCCGCAUCCCCUACUACGUCGGCCCCCUCGCCCGCGGCAACAGCCGCUUCGCCUGGAUGACCCGCAAGAGCGAGG |
| | | AGACCAUCACCCCCUGGAACUUCGAGGAGGUCGUCGACAAGGGCGCCAGCGCCCAGAGCUUCAUCGAGCGCAUGACCAACUUC |
| | | GACAAGAACCUCCCCAACGAGAAGGUCCUCCCCAAGCACAGCCUCCUCUACGAGUACUUCACCGUCUACAACGAGCUCACCAA |
| | | GGUCAAGUACGUCACCGAGGGCAUGCGCAAGCCCGCCUUCCUCAGCGGCGAGCAGAAGAAGGCCAUCGUCGACCUCCUCUUCA |
| | | AGACCAACCGCAAGGUCACCGUCAAGCAGCUCAAGGAGGACUACUUCAAGAAGAUCGAGUGCUUCGACAGCGUCGAGAUCAGC |
| | | GGCGUCGAGGACCGCUUCAACGCCAGCCUCGGCACCUACCACGACCUCCUCAAGAUCAUCAAGGACAAGGACUUCCUCGACAA |
| | | CGAGGAGAACGAGGACAUCCUCGAGGACAUCGUCCUCACCCUCACCCUCUUCGAGGACCGCGAGAUGAUCGAGGAGCGCCUCA |
| | | AGACCUACGCCCACCUCUUCGACGACAAGGUCAUGAAGCAGCUCAAGCGCCGCCGCUACACCGGCUGGGGCCGCCUCAGCCGC |
| | | AAGCUCAUCAACGGCAUCCGCGACAAGCAGAGCGGCAAGACCAUCCUCGACUUCCUCAAGAGCGACGGCUUCGCCAACCGCAA |
| | | CUUCAUGCAGCUCAUCCACGACGACAGCCUCACCUUCAAGGAGGACAUCCAGAAGGCCCAGGUCAGCGGCCAGGGCGACAGCC |
| | | UCCACGAGCACAUCGCCAACCUCGCCGGCAGCCCCGCCAUCAAGAAGGGCAUCCUCCAGACCGUCAAGGUCGUCGACGAGCUC |
| | | GUCAAGGUCAUGGGCCGCCACAAGCCCGAGAACAUCGUCAUCGAGAUGGCCCGCGAGAACCAGACCACCCAGAAGGGCCAGAA |
| | | GAACAGCCGCGAGCGCAUGAAGCGCAUCGAGGAGGGCAUCAAGGAGCUCGGCAGCCAGAUCCUCAAGGAGCACCCCGUCGAGA |
| | | ACACCCAGCUCCAGAACGAGAAGCUCUACCUCUACUACCUCCAGAACGGCCGCGACAUGUACGUCGACCAGGAGCUCGACAUC |
| | | AACCGCCUCAGCGACUACGACGUCGACCACAUCGUCCCCCAGAGCUUCCUCAAGGACGACAGCAUCGACAACAAGGUCCUCAC |
| | | CCGCAGCGACAAGAACCGCGGCAAGAGCGACAACGUCCCCAGCGAGGAGGUCGUCAAGAAGAUGAAGAACUACUGGCGCCAGC |
| | | UCCUCAACGCCAAGCUCAUCACCCAGCGCAAGUUCGACAACCUCACCAAGGCCGAGCGCGGCGGCCUCAGCGAGCUCGACAAG |
| | | GCCGGCUUCAUCAAGCGCCAGCUCGUCGAGACCCGCCAGAUCACCAAGCACGUCGCCCAGAUCCUCGACAGCCGCAUGAACAC |
| | | CAAGUACGACGAGAACGACAAGCUCAUCCGCGAGGUCAAGGUCAUCACCCUCAAGAGCAAGCUCGUCAGCGACUUCCGCAAGG |
| | | ACUUCCAGUUCUACAAGGUCCGCGAGAUCAACAACUACCACCACGCCCACGACGCCUACCUCAACGCCGUCGUCGGCACCGCC |
| | | CUCAUCAAGAAGUACCCCAAGCUCGAGAGCGAGUUCGUCUACGGCGACUACAAGGUCUACGACGUCCGCAAGAUGAUCGCCAA |
| | | GAGCGAGCAGGAGAUCGGCAAGGCCACCGCCAAGUACUUCUUCUACAGCAACAUCAUGAACUUCUUCAAGACCGAGAUCACCC |
| | | UCGCCAACGGCGAGAUCCGCAAGCGCCCCCUCAUCGAGACCAACGGCGAGACCGGCGAGAUCGUCUGGGACAAGGGCCGCGAC |
| | | UUCGCCACCGUCCGCAAGGUCCUCAGCAUGCCCCAGGUCAACAUCGUCAAGAAGACCGAGGUCCAGACCGGCGGCUUCAGCAA |
| | | GGAGAGCAUCCUCCCCAAGCGCAACAGCGACAAGCUCAUCGCCCGCAAGAAGGACUGGGACCCCAAGAAGUACGGCGGCUUCG |
| | | ACAGCCCCACCGUCGCCUACAGCGUCCUCGUCGUCGCCAAGGUCGAGAAGGGCAAGAGCAAGAAGCUCAAGAGCGUCAAGGAG |
| | | CUCCUCGGCAUCACCAUCAUGGAGCGCAGCAGCUUCGAGAAGAACCCCAUCGACUUCCUCGAGGCCAAGGGCUACAAGGAGGU |
| | | CAAGAAGGACCUCAUCAUCAAGCUCCCCAAGUACAGCCUCUUCGAGCUCGAGAACGGCCGCAAGCGCAUGCUCGCCAGCGCCG |
| | | GCGAGCUCCAGAAGGGCAACGAGCUCGCCCUCCCCAGCAAGUACGUCAACUUCCUCUACCUCGCCAGCCACUACGAGAAGCUC |
| | | AAGGGCAGCCCCGAGGACAACGAGCAGAAGCAGCUCUUCGUCGAGCAGCACAAGCACUACCUCGACGAGAUCAUCGAGCAGAU |
| | | CAGCGAGUUCAGCAAGCGCGUCAUCCUCGCCGACGCCAACCUCGACAAGGUCCUCAGCGCCUACAACAAGCACCGCGACAAGC |
| | | CCAUCCGCGAGCAGGCCGAGAACAUCAUCCACCUCUUCACCCUCACCAACCUCGGCGCCCCCGCCGCCUUCAAGUACUUCGAC |
| | | ACCACCAUCGACCGCAAGCGCUACACCAGCACCAAGGAGGUCCUCGACGCCACCCUCAUCCACCAGAGCAUCACCGGCCUCUA |
| | | CGAGACCCGCAUCGACCUCAGCCAGCUCGGCGGCGACGGCGGCGGCAGCCCCAAGAAGAAGCGCAAGGUCUAG |
| ORF | 47 | ATGGACAAGAAGTACAGCATCGGCCTGGACATCGGCACCAACAGCGTGGGCTGGGCCGTGATCACCGACGAGTACAAGGTGCC |
| encoding | | CAGCAAGAAGTTCAAGGTGCTGGGCAACACCGACCGGCACAGCATCAAGAAGAACCTGATCGGCGCCCTGCTGTTCGACAGCG |
| Sp. Cas9 | | GCGAGACCGCCGAGGCCACCCGGCTGAAGCGGACCGCCCGGCGGCGGTACACCCGGCGGAAGAACCGGATCTGCTACCTGCAG |
| | | GAGATCTTCAGCAACGAGATGGCCAAGGTGGACGACAGCTTCTTCCACCGGCTGGAGGAGAGCTTCCTGGTGGAGGAGGACAA |
| | | GAAGCACGAGCGGCACCCCATCTTCGGCAACATCGTGGACGAGGTGGCCTACCACGAGAAGTACCCCACCATCTACCACCTGC |
| | | GGAAGAAGCTGGTGGACAGCACCGACAAGGCCGACCTGCGGCTGATCTACCTGGCCCTGGCCCACATGATCAAGTTCCGGGGC |
| | | CACTTCCTGATCGAGGGCGACCTGAACCCCGACAACAGCGACGTGGACAAGCTGTTCATCCAGCTGGTGCAGACCTACAACCA |
| | | GCTGTTCGAGGAGAACCCCATCAACGCCAGCGGCGTGGACGCCAAGGCCATCCTGAGCGCCCGGCTGAGCAAGAGCCGGCGGC |
| | | TGGAGAACCTGATCGCCCAGCTGCCCGGCGAGAAGAAGAACGGCCTGTTCGGCAACCTGATCGCCCTGAGCCTGGGCCTGACC |
| | | CCCAACTTCAAGAGCAACTTCGACCTGGCCGAGGACGCCAAGCTGCAGCTGAGCAAGGACACCTACGACGACGACCTGGACAA |
| | | CCTGCTGGCCCAGATCGGCGACCAGTACGCCGACCTGTTCCTGGCCGCCAAGAACCTGAGCGACGCCATCCTGCTGAGCGACA |
| | | TCCTGCGGGTGAACACCGAGATCACCAAGGCCCCCCTGAGCGCCAGCATGATCAAGCGGTACGACGAGCACCACCAGGACCTG |
| | | ACCCTGCTGAAGGCCCTGGTGCGGCAGCAGCTGCCCGAGAAGTACAAGGAGATCTTCTTCGACCAGAGCAAGAACGGCTACGC |
| | | CGGCTACATCGACGGCGGCGCCAGCCAGGAGGAGTTCTACAAGTTCATCAAGCCCATCCTGGAGAAGATGGACGGCACCGAGG |
| | | AGCTGCTGGTGAAGCTGAACCGGGAGGACCTGCTGCGGAAGCAGCGGACCTTCGACAACGGCAGCATCCCCCACCAGATCCAC |
| | | CTGGGCGAGCTGCACGCCATCCTGCGGCGGCAGGAGGACTTCTACCCCTTCCTGAAGGACAACCGGGAGAAGATCGAGAAGAT |
| | | CCTGACCTTCCGGATCCCCTACTACGTGGGCCCCCTGGCCCGGGGCAACAGCCGGTTCGCCTGGATGACCCGGAAGAGCGAGG |
| | | AGACCATCACCCCCTGGAACTTCGAGGAGGTGGTGGACAAGGGCGCCAGCGCCCAGAGCTTCATCGAGCGGATGACCAACTTC |
| | | GACAAGAACCTGCCCAACGAGAAGGTGCTGCCCAAGCACAGCCTGCTGTACGAGTACTTCACCGTGTACAACGAGCTGACCAA |
| | | GGTGAAGTACGTGACCGAGGGCATGCGGAAGCCCGCCTTCCTGAGCGGCGAGCAGAAGAAGGCCATCGTGGACCTGCTGTTCA |
| | | AGACCAACCGGAAGGTGACCGTGAAGCAGCTGAAGGAGGACTACTTCAAGAAGATCGAGTGCTTCGACAGCGTGGAGATCAGC |
| | | GGCGTGGAGGACCGGTTCAACGCCAGCCTGGGCACCTACCACGACCTGCTGAAGATCATCAAGGACAAGGACTTCCTGGACAA |
| | | CGAGGAGAACGAGGACATCCTGGAGGACATCGTGCTGACCCTGACCCTGTTCGAGGACCGGGAGATGATCGAGGAGCGGCTGA |
| | | AGACCTACGCCCACCTGTTCGACGACAAGGTGATGAAGCAGCTGAAGCGGCGGCGGTACACCGGCTGGGGCCGGCTGAGCCGG |
| | | AAGCTGATCAACGGCATCCGGGACAAGCAGAGCGGCAAGACCATCCTGGACTTCCTGAAGAGCGACGGCTTCGCCAACCGGAA |
| | | CTTCATGCAGCTGATCCACGACGACAGCCTGACCTTCAAGGAGGACATCCAGAAGGCCCAGGTGAGCGGCCAGGGCGACAGCC |
| | | TGCACGAGCACATCGCCAACCTGGCCGGCAGCCCCGCCATCAAGAAGGGCATCCTGCAGACCGTGAAGGTGGTGGACGAGCTG |
| | | GTGAAGGTGATGGGCCGGCACAAGCCCGAGAACATCGTGATCGAGATGGCCCGGGAGAACCAGACCACCCAGAAGGGCCAGAA |
| | | GAACAGCCGGGAGCGGATGAAGCGGATCGAGGAGGGCATCAAGGAGCTGGGCAGCCAGATCCTGAAGGAGCACCCCGTGGAGA |
| | | ACACCCAGCTGCAGAACGAGAAGCTGTACCTGTACTACCTGCAGAACGGCCGGGACATGTACGTGGACCAGGAGCTGGACATC |
| | | AACCGGCTGAGCGACTACGACGTGGACCACATCGTGCCCCAGAGCTTCCTGAAGGACGACAGCATCGACAACAAGGTGCTGAC |
| | | CCGGAGCGACAAGAACCGGGGCAAGAGCGACAACGTGCCCAGCGAGGAGGTGGTGAAGAAGATGAAGAACTACTGGCGGCAGC |
| | | TGCTGAACGCCAAGCTGATCACCCAGCGGAAGTTCGACAACCTGACCAAGGCCGAGCGGGGCGGCCTGAGCGAGCTGGACAAG |
| | | GCCGGCTTCATCAAGCGGCAGCTGGTGGAGACCCGGCAGATCACCAAGCACGTGGCCCAGATCCTGGACAGCCGGATGAACAC |
| | | CAAGTACGACGAGAACGACAAGCTGATCCGGGAGGTGAAGGTGATCACCCTGAAGAGCAAGCTGGTGAGCGACTTCCGGAAGG |
| | | ACTTCCAGTTCTACAAGGTGCGGGAGATCAACAACTACCACCACGCCCACGACGCCTACCTGAACGCCGTGGTGGGCACCGCC |
| | | CTGATCAAGAAGTACCCCAAGCTGGAGAGCGAGTTCGTGTACGGCGACTACAAGGTGTACGACGTGCGGAAGATGATCGCCAA |
| | | GAGCGAGCAGGAGATCGGCAAGGCCACCGCCAAGTACTTCTTCTACAGCAACATCATGAACTTCTTCAAGACCGAGATCACCC |
| | | TGGCCAACGGCGAGATCCGGAAGCGGCCCCTGATCGAGACCAACGGCGAGACCGGCGAGATCGTGTGGGACAAGGGCCGGGAC |
| | | TTCGCCACCGTGCGGAAGGTGCTGAGCATGCCCCAGGTGAACATCGTGAAGAAGACCGAGGTGCAGACCGGCGGCTTCAGCAA |
| | | GGAGAGCATCCTGCCCAAGCGGAACAGCGACAAGCTGATCGCCCGGAAGAAGGACTGGGACCCCAAGAAGTACGGCGGCTTCG |
| | | ACAGCCCCACCGTGGCCTACAGCGTGCTGGTGGTGGCCAAGGTGGAGAAGGGCAAGAGCAAGAAGCTGAAGAGCGTGAAGGAG |
| | | CTGCTGGGCATCACCATCATGGAGCGGAGCAGCTTCGAGAAGAACCCCATCGACTTCCTGGAGGCCAAGGGCTACAAGGAGGT |
| | | GAAGAAGGACCTGATCATCAAGCTGCCCAAGTACAGCCTGTTCGAGCTGGAGAACGGCCGGAAGCGGATGCTGGCCAGCGCCG |
| | | GCGAGCTGCAGAAGGGCAACGAGCTGGCCCTGCCCAGCAAGTACGTGAACTTCCTGTACCTGGCCAGCCACTACGAGAAGCTG |
| | | AAGGGCAGCCCCGAGGACAACGAGCAGAAGCAGCTGTTCGTGGAGCAGCACAAGCACTACCTGGACGAGATCATCGAGCAGAT |
| | | CAGCGAGTTCAGCAAGCGGGTGATCCTGGCCGACGCCAACCTGGACAAGGTGCTGAGCGCCTACAACAAGCACCGGGACAAGC |
| | | CCATCCGGGAGCAGGCCGAGAACATCATCCACCTGTTCACCCTGACCAACCTGGGCGCCCCCGCCGCCTTCAAGTACTTCGAC |
| | | ACCACCATCGACCGGAAGCGGTACACCAGCACCAAGGAGGTGCTGGACGCCACCCTGATCCACCAGAGCATCACCGGCCTGTA |
| | | CGAGACCCGGATCGACCTGAGCCAGCTGGGCGGCGACGGCGGCGGCAGCCCCAAGAAGAAGCGGAAGGTGTGA |
| amino | 48 | MDKKYSIGLDIGTNSVGWAVITDEYKVPSKKFKVLGNTDRHSIKKNLIGALLEDSGETAEATRLKRTARRRYTRRKNRICYLQ |
| acid | | EIFSNEMAKVDDSFFHRLEESELVEEDKKHERHPIFGNIVDEVAYHEKYPTIYHLRKKLVDSTDKADLRLIYLALAHMIKERG |
| sequence | | HFLIEGDLNPDNSDVDKLFIQLVQTYNQLFEENPINASGVDAKAILSARLSKSRRLENLIAQLPGEKKNGLFGNLIALSLGLT |
| for Sp. | | PNFKSNEDLAEDAKLQLSKDTYDDDLDNLLAQIGDQYADLELAAKNLSDAILLSDILRVNTEITKAPLSASMIKRYDEHHQDL |
| Cas9 | | TLLKALVRQQLPEKYKEIFFDQSKNGYAGYIDGGASQEEFYKFIKPILEKMDGTEELLVKLNREDLLRKQRTEDNGSIPHQIH |
| | | LGELHAILRRQEDFYPELKDNREKIEKILTFRIPYYVGPLARGNSRFAWMTRKSEETITPWNFEEVVDKGASAQSFIERMTNE |
| | | DKNLPNEKVLPKHSLLYEYFTVYNELTKVKYVTEGMRKPAFLSGEQKKAIVDLLFKTNRKVTVKQLKEDYFKKIECFDSVEIS |
| | | GVEDRENASLGTYHDLLKIIKDKDELDNEENEDILEDIVLTLTLFEDREMIEERLKTYAHLEDDKVMKQLKRRRYTGWGRLSR |
| | | KLINGIRDKQSGKTILDFLKSDGFANRNEMQLIHDDSLTFKEDIQKAQVSGQGDSLHEHIANLAGSPAIKKGILQTVKVVDEL |
| | | VKVMGRHKPENIVIEMARENQTTQKGQKNSRERMKRIEEGIKELGSQILKEHPVENTQLQNEKLYLYYLQNGRDMYVDQELDI |
| | | NRLSDYDVDHIVPQSFLKDDSIDNKVLTRSDKNRGKSDNVPSEEVVKKMKNYWRQLLNAKLITQRKFDNLTKAERGGLSELDK |
| | | AGFIKRQLVETRQITKHVAQILDSRMNTKYDENDKLIREVKVITLKSKLVSDERKDFQFYKVREINNYHHAHDAYLNAVVGTA |
| | | LIKKYPKLESEFVYGDYKVYDVRKMIAKSEQEIGKATAKYFFYSNIMNFFKTEITLANGEIRKRPLIETNGETGEIVWDKGRD |
| | | FATVRKVLSMPQVNIVKKTEVQTGGFSKESILPKRNSDKLIARKKDWDPKKYGGFDSPTVAYSVLVVAKVEKGKSKKLKSVKE |
| | | LLGITIMERSSFEKNPIDFLEAKGYKEVKKDLIIKLPKYSLFELENGRKRMLASAGELQKGNELALPSKYVNFLYLASHYEKL |
| | | KGSPEDNEQKQLFVEQHKHYLDEIIEQISEFSKRVILADANLDKVLSAYNKHRDKPIREQAENIIHLETLTNLGAPAAFKYED |
| | | TTIDRKRYTSTKEVLDATLIHQSITGLYETRIDLSQLGGDGGGSPKKKRKV |
| Open | 49 | AUGGACAAGAAGUACUCCAUCGGCCUGGACAUCGGCACCAACUCCGUGGGCUGGGCCGUGAUCACCGACGAGUACAAGGUGCC |
| reading | | CUCCAAGAAGUUCAAGGUGCUGGGCAACACCGACCGGCACUCCAUCAAGAAGAACCUGAUCGGCGCCCUGCUGUUCGACUCCG |
| frame for | | GCGAGACCGCCGAGGCCACCCGGCUGAAGCGGACCGCCCGGCGGCGGUACACCCGGCGGAAGAACCGGAUCUGCUACCUGCAG |
| Cas9 with | | GAGAUCUUCUCCAACGAGAUGGCCAAGGUGGACGACUCCUUCUUCCACCGGCUGGAGGAGUCCUUCCUGGUGGAGGAGGACAA |
| HiBiT tag | | GAAGCACGAGCGGCACCCCAUCUUCGGCAACAUCGUGGACGAGGUGGCCUACCACGAGAAGUACCCCACCAUCUACCACCUGC |
| | | GGAAGAAGCUGGUGGACUCCACCGACAAGGCCGACCUGCGGCUGAUCUACCUGGCCCUGGCCCACAUGAUCAAGUUCCGGGGC |
| | | CACUUCCUGAUCGAGGGCGACCUGAACCCCGACAACUCCGACGUGGACAAGCUGUUCAUCCAGCUGGUGCAGACCUACAACCA |
| | | GCUGUUCGAGGAGAACCCCAUCAACGCCUCCGGCGUGGACGCCAAGGCCAUCCUGUCCGCCCGGCUGUCCAAGUCCCGGCGGC |
| | | UGGAGAACCUGAUCGCCCAGCUGCCCGGCGAGAAGAAGAACGGCCUGUUCGGCAACCUGAUCGCCCUGUCCCUGGGCCUGACC |
| | | CCCAACUUCAAGUCCAACUUCGACCUGGCCGAGGACGCCAAGCUGCAGCUGUCCAAGGACACCUACGACGACGACCUGGACAA |
| | | CCUGCUGGCCCAGAUCGGCGACCAGUACGCCGACCUGUUCCUGGCCGCCAAGAACCUGUCCGACGCCAUCCUGCUGUCCGACA |
| | | UCCUGCGGGUGAACACCGAGAUCACCAAGGCCCCCCUGUCCGCCUCCAUGAUCAAGCGGUACGACGAGCACCACCAGGACCUG |
| | | ACCCUGCUGAAGGCCCUGGUGCGGCAGCAGCUGCCCGAGAAGUACAAGGAGAUCUUCUUCGACCAGUCCAAGAACGGCUACGC |
| | | CGGCUACAUCGACGGCGGCGCCUCCCAGGAGGAGUUCUACAAGUUCAUCAAGCCCAUCCUGGAGAAGAUGGACGGCACCGAGG |
| | | AGCUGCUGGUGAAGCUGAACCGGGAGGACCUGCUGCGGAAGCAGCGGACCUUCGACAACGGCUCCAUCCCCCACCAGAUCCAC |
| | | CUGGGCGAGCUGCACGCCAUCCUGCGGCGGCAGGAGGACUUCUACCCCUUCCUGAAGGACAACCGGGAGAAGAUCGAGAAGAU |
| | | CCUGACCUUCCGGAUCCCCUACUACGUGGGCCCCCUGGCCCGGGGCAACUCCCGGUUCGCCUGGAUGACCCGGAAGUCCGAGG |
| | | AGACCAUCACCCCCUGGAACUUCGAGGAGGUGGUGGACAAGGGCGCCUCCGCCCAGUCCUUCAUCGAGCGGAUGACCAACUUC |
| | | GACAAGAACCUGCCCAACGAGAAGGUGCUGCCCAAGCACUCCCUGCUGUACGAGUACUUCACCGUGUACAACGAGCUGACCAA |
| | | GGUGAAGUACGUGACCGAGGGCAUGCGGAAGCCCGCCUUCCUGUCCGGCGAGCAGAAGAAGGCCAUCGUGGACCUGCUGUUCA |
| | | AGACCAACCGGAAGGUGACCGUGAAGCAGCUGAAGGAGGACUACUUCAAGAAGAUCGAGUGCUUCGACUCCGUGGAGAUCUCC |
| | | GGCGUGGAGGACCGGUUCAACGCCUCCCUGGGCACCUACCACGACCUGCUGAAGAUCAUCAAGGACAAGGACUUCCUGGACAA |
| | | CGAGGAGAACGAGGACAUCCUGGAGGACAUCGUGCUGACCCUGACCCUGUUCGAGGACCGGGAGAUGAUCGAGGAGCGGCUGA |
| | | AGACCUACGCCCACCUGUUCGACGACAAGGUGAUGAAGCAGCUGAAGCGGCGGCGGUACACCGGCUGGGGCCGGCUGUCCCGG |
| | | AAGCUGAUCAACGGCAUCCGGGACAAGCAGUCCGGCAAGACCAUCCUGGACUUCCUGAAGUCCGACGGCUUCGCCAACCGGAA |
| | | CUUCAUGCAGCUGAUCCACGACGACUCCCUGACCUUCAAGGAGGACAUCCAGAAGGCCCAGGUGUCCGGCCAGGGCGACUCCC |
| | | UGCACGAGCACAUCGCCAACCUGGCCGGCUCCCCCGCCAUCAAGAAGGGCAUCCUGCAGACCGUGAAGGUGGUGGACGAGCUG |
| | | GUGAAGGUGAUGGGCCGGCACAAGCCCGAGAACAUCGUGAUCGAGAUGGCCCGGGAGAACCAGACCACCCAGAAGGGCCAGAA |
| | | GAACUCCCGGGAGCGGAUGAAGCGGAUCGAGGAGGGCAUCAAGGAGCUGGGCUCCCAGAUCCUGAAGGAGCACCCCGUGGAGA |
| | | ACACCCAGCUGCAGAACGAGAAGCUGUACCUGUACUACCUGCAGAACGGCCGGGACAUGUACGUGGACCAGGAGCUGGACAUC |
| | | AACCGGCUGUCCGACUACGACGUGGACCACAUCGUGCCCCAGUCCUUCCUGAAGGACGACUCCAUCGACAACAAGGUGCUGAC |
| | | CCGGUCCGACAAGAACCGGGGCAAGUCCGACAACGUGCCCUCCGAGGAGGUGGUGAAGAAGAUGAAGAACUACUGGCGGCAGC |
| | | UGCUGAACGCCAAGCUGAUCACCCAGCGGAAGUUCGACAACCUGACCAAGGCCGAGCGGGGCGGCCUGUCCGAGCUGGACAAG |
| | | GCCGGCUUCAUCAAGCGGCAGCUGGUGGAGACCCGGCAGAUCACCAAGCACGUGGCCCAGAUCCUGGACUCCCGGAUGAACAC |
| | | CAAGUACGACGAGAACGACAAGCUGAUCCGGGAGGUGAAGGUGAUCACCCUGAAGUCCAAGCUGGUGUCCGACUUCCGGAAGG |
| | | ACUUCCAGUUCUACAAGGUGCGGGAGAUCAACAACUACCACCACGCCCACGACGCCUACCUGAACGCCGUGGUGGGCACCGCC |
| | | CUGAUCAAGAAGUACCCCAAGCUGGAGUCCGAGUUCGUGUACGGCGACUACAAGGUGUACGACGUGCGGAAGAUGAUCGCCAA |
| | | GUCCGAGCAGGAGAUCGGCAAGGCCACCGCCAAGUACUUCUUCUACUCCAACAUCAUGAACUUCUUCAAGACCGAGAUCACCC |
| | | UGGCCAACGGCGAGAUCCGGAAGCGGCCCCUGAUCGAGACCAACGGCGAGACCGGCGAGAUCGUGUGGGACAAGGGCCGGGAC |
| | | UUCGCCACCGUGCGGAAGGUGCUGUCCAUGCCCCAGGUGAACAUCGUGAAGAAGACCGAGGUGCAGACCGGCGGCUUCUCCAA |
| | | GGAGUCCAUCCUGCCCAAGCGGAACUCCGACAAGCUGAUCGCCCGGAAGAAGGACUGGGACCCCAAGAAGUACGGCGGCUUCG |
| | | ACUCCCCCACCGUGGCCUACUCCGUGCUGGUGGUGGCCAAGGUGGAGAAGGGCAAGUCCAAGAAGCUGAAGUCCGUGAAGGAG |
| | | CUGCUGGGCAUCACCAUCAUGGAGCGGUCCUCCUUCGAGAAGAACCCCAUCGACUUCCUGGAGGCCAAGGGCUACAAGGAGGU |
| | | GAAGAAGGACCUGAUCAUCAAGCUGCCCAAGUACUCCCUGUUCGAGCUGGAGAACGGCCGGAAGCGGAUGCUGGCCUCCGCCG |
| | | GCGAGCUGCAGAAGGGCAACGAGCUGGCCCUGCCCUCCAAGUACGUGAACUUCCUGUACCUGGCCUCCCACUACGAGAAGCUG |
| | | AAGGGCUCCCCCGAGGACAACGAGCAGAAGCAGCUGUUCGUGGAGCAGCACAAGCACUACCUGGACGAGAUCAUCGAGCAGAU |
| | | CUCCGAGUUCUCCAAGCGGGUGAUCCUGGCCGACGCCAACCUGGACAAGGUGCUGUCCGCCUACAACAAGCACCGGGACAAGC |
| | | CCAUCCGGGAGCAGGCCGAGAACAUCAUCCACCUGUUCACCCUGACCAACCUGGGCGCCCCCGCCGCCUUCAAGUACUUCGAC |
| | | ACCACCAUCGACCGGAAGCGGUACACCUCCACCAAGGAGGUGCUGGACGCCACCCUGAUCCACCAGUCCAUCACCGGCCUGUA |
| | | CGAGACCCGGAUCGACCUGUCCCAGCUGGGCGGCGACGGCGGCGGCUCCCCCAAGAAGAAGCGGAAGGUGUCCGAGUCCGCCA |
| | | CCCCCGAGUCCGUGUCCGGCUGGCGGCUGUUCAAGAAGAUCUCCUGA |
| Amino | 50 | MDKKYSIGLDIGTNSVGWAVITDEYKVPSKKFKVLGNTDRHSIKKNLIGALLFDSGETAEATRLKRTARRRYTRRKNRICYLQ |
| acid | | EIFSNEMAKVDDSFFHRLEESELVEEDKKHERHPIFGNIVDEVAYHEKYPTIYHLRKKLVDSTDKADLRLIYLALAHMIKERG |
| sequence | | HFLIEGDLNPDNSDVDKLFIQLVQTYNQLFEENPINASGVDAKAILSARLSKSRRLENLIAQLPGEKKNGLFGNLIALSLGLT |
| for Cas9 | | PNFKSNFDLAEDAKLQLSKDTYDDDLDNLLAQIGDQYADLFLAAKNLSDAILLSDILRVNTEITKAPLSASMIKRYDEHHQDL |
| with | | TLLKALVRQQLPEKYKEIFFDQSKNGYAGYIDGGASQEEFYKFIKPILEKMDGTEELLVKLNREDLLRKQRTEDNGSIPHQIH |
| HiBiT tag | | LGELHAILRRQEDFYPFLKDNREKIEKILTFRIPYYVGPLARGNSRFAWMTRKSEETITPWNFEEVVDKGASAQSFIERMTNF |
| | | DKNLPNEKVLPKHSLLYEYFTVYNELTKVKYVTEGMRKPAFLSGEQKKAIVDLLFKTNRKVTVKQLKEDYFKKIECFDSVEIS |
| | | GVEDRFNASLGTYHDLLKIIKDKDELDNEENEDILEDIVLTLTLFEDREMIEERLKTYAHLEDDKVMKQLKRRRYTGWGRLSR |
| | | KLINGIRDKQSGKTILDFLKSDGFANRNFMQLIHDDSLTFKEDIQKAQVSGQGDSLHEHIANLAGSPAIKKGILQTVKVVDEL |
| | | VKVMGRHKPENIVIEMARENQTTQKGQKNSRERMKRIEEGIKELGSQILKEHPVENTQLQNEKLYLYYLQNGRDMYVDQELDI |
| | | NRLSDYDVDHIVPQSFLKDDSIDNKVLTRSDKNRGKSDNVPSEEVVKKMKNYWRQLLNAKLITQRKEDNLTKAERGGLSELDK |
| | | AGFIKRQLVETRQITKHVAQILDSRMNTKYDENDKLIREVKVITLKSKLVSDERKDFQFYKVREINNYHHAHDAYLNAVVGTA |
| | | LIKKYPKLESEFVYGDYKVYDVRKMIAKSEQEIGKATAKYFFYSNIMNFFKTEITLANGEIRKRPLIETNGETGEIVWDKGRD |
| | | FATVRKVLSMPQVNIVKKTEVQTGGESKESILPKRNSDKLIARKKDWDPKKYGGEDSPTVAYSVLVVAKVEKGKSKKLKSVKE |
| | | LLGITIMERSSFEKNPIDFLEAKGYKEVKKDLIIKLPKYSLFELENGRKRMLASAGELQKGNELALPSKYVNFLYLASHYEKL |
| | | KGSPEDNEQKQLFVEQHKHYLDEIIEQISEFSKRVILADANLDKVLSAYNKHRDKPIREQAENIIHLFTLTNLGAPAAFKYED |
| | | TTIDRKRYTSTKEVLDATLIHQSITGLYETRIDLSQLGGDGGGSPKKKRKVSESATPESVSGWRLEKKIS |
| Amino | 151 | MEASPASGPRHLMDPHIFTSNENNGIGRHKTYLCYEVERLDNGTSVKMDQHRGFLHNQAKNLLCGFYGRHAELRELDLVPSLQ |
| acid | | LDPAQIYRVTWFISWSPCFSWGCAGEVRAFLQENTHVRLRIFAARIYDYDPLYKEALQMLRDAGAQVSIMTYDEFKHCWDTEV |
| sequence | | DHQGCPFQPWDGLDEHSQALSGRLRAILQNQGN |
| of H. | | |
| sapiens | | |
| APOBEC3A | | |
| deaminase | | |
| (A3A) | | |
| Amino | 152 | MSSETGPVAVDPTLRRRIEPHEFEVFFDPRELRKETCLLYEINWGGRHSIWRHTSQNTNKHVEVNFIEKFTTERYFCPNTRCS |
| acid | | ITWFLSWSPCGECSRAITEFLSRYPHVTLFIYIARLYHHADPRNRQGLRDLISSGVTIQIMTEQESGYCWRNFVNYSPSNEAH |
| sequence | | WPRYPHLWVRLYVLELYCIILGLPPCLNILRRKQPQLTFFTIALQSCHYQRLPPHILWATGLK |
| of R. | | |
| norvegicus | | |
| Apobec1 | | |
| Exemplary | 153 | MSSETGPVAVDPTLRRRIEPHEFEVFEDPRELRKETCLLYEINWGGRHSVWRHTSQNTSNHVEVNFLEKFTTERYFRPNTRCS |
| amino | | ITWFLSWSPCGECSRAITEFLSRHPYVTLF |
| acid | | |
| sequences | | |
| for | | |
| cytidine | | |
| deaminase | | |
| Exemplary | 154 | MSSETGPVAVDPTLRRRIEPHEFEVFFDPRELRKETCLLYEINWGGRHSVWRHTSQNTSNHVEVNFLEKFTTERYFRPNTRCS |
| amino | | ITWFLSWSPCGECSRAITEFLSRHPYVTLFIYIARLYH |
| acid | | |
| sequences | | |
| for | | |
| cytidine | | |
| deaminase | | |
| Exemplary | 155 | MNWNALRSKAIEVSRHAYAPYSGFPVGAAALVDDGRTVTGCNVENVSYGLGLCAECAVVCALHSGGGGRLVALSCVGPDGGVL |
| amino | | MPCGRCRQVLLEHGGPELLIDHAHGPRPLRELLPDAFGPDDLGRR |
| acid | | |
| sequences | | |
| for | | |
| cytidine | | |
| deaminase | | |
| Exemplary | 156 | MTHHALIEAAKAAREKAYAPYSNEKVGAALVTNDGKVFHGCNVENASYGLCNCAERTALESALAAGYRPGEFAAIAVVGETHG |
| amino | | PIAPCGACRQVMIELGKPTLEVVLTNMQGDVRVTSAGDLLPDAFYLA |
| acid | | |
| sequences | | |
| for | | |
| cytidine | | |
| deaminase | | |
| Exemplary | 157 | MPDIDWKQLRDKATQVAAGAYAPYSRFPVGAAALVDDGRVVTGCNVENVSYGLALCAECGVVCALHATGGGRLVALACVDGRG |
| amino | | APLMPCGRCRQLLFEHGGPELLVDHLAGPRRLGDLLPEPFHADLTGEPT |
| acid | | |
| sequences | | |
| for | | |
| cytidine | | |
| deaminase | | |
| Exemplary | 158 | MNSKQLIQEAIEARKQAYVPYSKFQVGAALLTQDGKVYRGCNVENASYGLCNCAERTALFKAVSEGDKEFVAIAIVADTKRPV |
| amino | | PPCGACRQVMVELCKQDTKVYLSNLHGDVQETTVGELLPGAFLAEDLHE |
| acid | | |
| sequences | | |
| for | | |
| cytidine | | |
| deaminase | | |
| Exemplary | 159 | MPDVDWNMLRGNATQAAAGAYVPYSRFAVGAAALVDDGRVVTGCNVENVSYGLTLCAECAVVCALHSTGGGRLLALACVDGHG |
| amino | | SVLMPCGRCRQVLLEHGGSELLIDHPVRPRRLGDLLPDAFGLDDLPRERR |
| acid | | |
| sequences | | |
| for | | |
| cytidine | | |
| deaminase | | |
| Exemplary | 160 | MGDVNWDTLQKAAVAARANSYAPYSNFPVGVAGFVNDGRLITGVNVENASYGLALCAECSMISALYATGGGRLVAVYCVDGNG |
| amino | | DSLMPCGRCRQLLYEHGGPELKIMTPKGVQTMAQLLPQAFNPQERIFGNDE |
| acid | | |
| sequences | | |
| for | | |
| cytidine | | |
| deaminase | | |
| Exemplary | 161 | MNRQELITEALKARDMAYAPYSKFQVGAALLTKDGKVYRGCNIENAAYSMCNCAERTALFKAVSEGDTEFQMLAVAADTPGPV |
| amino | | SPCGACRQVISELCTKDVIVVLTNLQGQIKEMTVEELLPGAFSSEDLHDERKL |
| acid | | |
| sequences | | |
| for | | |
| cytidine | | |
| deaminase | | |
| Exemplary | 162 | MKVGGIEDRQLEALKRAALKACELSYSPYSHFRVGCSILTNNDVIFTGANVENASYSNCICAERSAMIQVLMAGHRSGWKCMV |
| amino | | ICGDSEDQCVSPCGVCRQFINEFVVKDFPIVMLNSTGSRSKVMTMGELLPMAFGPSHLN |
| acid | | |
| sequences | | |
| for | | |
| cytidine | | |
| deaminase | | |
| Exemplary | 163 | MNIEQQLYDVVKQLIEQRYPNDWGGAAAIRVEDGTIYTSVAPDVINASTELCMETGAILEAHKFQKKVTHSICLARENEHSEL |
| amino | | KVLSPCGVCQERLFYWGPEVQCAITNAKQDIIFKPLKELQPYHWTEAYHDEMVKEWSTR |
| acid | | |
| sequences | | |
| for | | |
| cytidine | | |
| deaminase | | |
| Exemplary | 164 | MAQERPSCAVEPEHVQRLLLSSREAKKSAYCPYSRFPVGAALLTGDGRIFSGCNIENACYPLGVCAERTAIQKAISEGYKDER |
| amino | | AIAISSDLQEEFISPCGACRQVMREFGTDWAVYMTKPDGTFVVRTVQELLPASFGPEDLQKIQ |
| acid | | |
| sequences | | |
| for | | |
| cytidine | | |
| deaminase | | |
| Exemplary | 165 | MAQKRPACTLKPECVQQLLVCSQEAKKSAYCPYSHFPVGAALLTQEGRIFKGCNIENACYPLGICAERTAIQKAVSEGYKDER |
| amino | | AIAIASDMQDDFISPCGACRQVMREFGTNWPVYMTKPDGTYIVMTVQELLPSSFGPEDLQKTQ |
| acid | | |
| sequences | | |
| for | | |
| cytidine | | |
| deaminase | | |
| Exemplary | 166 | MVTGGMASKWDQKGMDIAYEEAALGYKEGGVPIGGCLINNKDGSVLGRGHNMRFQKGSATLHGEISTLENCGRLEGKVYKDTT |
| amino | | LYTTLSPCDMCTGAIIMYGIPRCVVGENVNFKSKGEKYLQTRGHEVVVVDDERCKKIMKQFIDERPQDWFEDIGE |
| acid | | |
| sequences | | |
| for | | |
| cytidine | | |
| deaminase | | |
| Exemplary | 167 | MTTTKANLTEFEQQLVDKAIGAMENAYCKYSNFKVGAALVCDDGEIIIGANHENASYGATICAERSAIVTALTKGHRKFKYIV |
| amino | | VATELEAPCSPCGVCRQVLIEFGDYKVILGSSTSDQIIETTTYELLPYAFTPKSLDDHEKETEERKHHNDHNNKE |
| acid | | |
| sequences | | |
| for | | |
| cytidine | | |
| deaminase | | |
| Exemplary | 168 | MAANSLPQDISDVELVHLARAAMKRAHCPYSKFPVGAALLTESGEIVQGCNVENASYGGTICAERSAIVSAVSQGYTKFRAIA |
| amino | | VVTELSEPASPCGLCRQFLVEFGDYKVVVGTASNNKILITSTRALLPFAFTPESLDTFEQEKASEAKGLKQDDATEHNVTVVS |
| acid | | |
| sequences | | |
| for | | |
| cytidine | | |
| deaminase | | |
| Exemplary | 169 | MNPQIRNPMKAMYPGTFYFQFKNLWEANDRNETWLCFTVEGIKRRSVVSWKTGVERNQVDSETHCHAERCFLSWFCDDILSPN |
| amino | | TKYQVTWYTSWSPCPDCAGEVAEFLARHSNVNLTIFTARLYYFQYPCYQEGLRSLSQEGVAVEIMDYEDEKYCWENEVYNDNE |
| acid | | PFKPWKGLKTNFRLLKRRLRESLQ |
| sequences | | |
| for | | |
| cytidine | | |
| deaminase | | |
| Exemplary | 170 | MNPQIRNPMEAMYPHIFYFHFKNLLKACGRNESWLCFTMEVTKHHSAVFRKRGVFRNQVDPETHCHAERCFLSWFCDDILSPN |
| amino | | TNYEVTWYTSWSPCPECAGEVAEFLARHSNVNLTIFTARLCYFWDTDYQEGLCSLSQEGASVKIMGYKDFVSCWKNEVYSDDE |
| acid | | PFKPWKGLQTNFRLLKRRLREILQ |
| sequences | | |
| for | | |
| cytidine | | |
| deaminase | | |
| Exemplary | 171 | MNDALHIGLPPFLVQANNEPRVLAAPEARMGYVLELVRANIAADGGPFAAAVFERDSGLLIAAGTNRVVPGRCSAAHAEILAL |
| amino | | SLAQAKLDTHDLSADGLPACELVTSAEPCVMCFGAVIWSGVRSLVCAARSDDVEAIGEDEGPRPENWMGGLEARGITVTTGLL |
| acid | | RDAACALLREYNACNGVIYNARCGVHK |
| sequences | | |
| for | | |
| cytidine | | |
| deaminase | | |
| Exemplary | 172 | MDSLLMNRRKFLYQFKNVRWAKGRRETYLCYVVKRRDSATSFSLDEGYLRNKNGCHVELLFLRYISDWDLDPGRCYRVTWETS |
| amino | | WSPCYDCARHVADFLRGNPNLSLRIFTARLYFCEDRKAEPEGLRRLHRAGVQIAIMTFKDYFYCWNTEVENHERTFKAWEGLH |
| acid | | ENSVRLSRQLRRILLPLYEVDDLRDAFRTLGL |
| sequences | | |
| for | | |
| cytidine | | |
| deaminase | | |
| Exemplary | 173 | MDSLLMKQKKFLYHFKNVRWAKGRHETYLCYVVKRRDSATSCSLDFGHLRNKSGCHVELLFLRYISDWDLDPGRCYRVTWFTS |
| amino | | WSPCYDCARHVAEFLRWNPNLSLRIFTARLYFCEDRKAEPEGLRRLHRAGVQIGIMTFKDYFYCWNTEVENRERTFKAWEGLH |
| acid | | ENSVRLTRQLRRILLPLYEVDDLRDAFRMLGF |
| sequences | | |
| for | | |
| cytidine | | |
| deaminase | | |
| Exemplary | 174 | MALLTAETFRLQFNNKRRLRRPYYPRKALLCYQLTPQNGSTPTRGYFENKKKCHAEICFINEIKSMGLDETQCYQVTCYLTWS |
| amino | | PCSSCAWELVDFIKAHDHLNLGIFASRLYYHWCKPQQKGLRLLCGSQVPVEVMGFPKFADCWENFVDHEKPLSFNPYKMLEEL |
| acid | | DKNSRAIKRRLERIKIPGVRAQGRYMDILCDAEV |
| sequences | | |
| for | | |
| cytidine | | |
| deaminase | | |
| Exemplary | 175 | MAQKEEAAVATEAASQNGEDLENLDDPEKLKELIELPPFEIVTGERLPANFFKFQFRNVEYSSGRNKTFLCYVVEAQGKGGQV |
| amino | | QASRGYLEDEHAAAHAEEAFENTILPAFDPALRYNVTWYVSSSPCAACADRIIKTLSKTKNLRLLILVGRLFMWEEPEIQAAL |
| acid | | KKLKEAGCKLRIMKPQDFEYVWQNFVEQEEGESKAFQPWEDIQENFLYYEEKLADILK |
| sequences | | |
| for | | |
| cytidine | | |
| deaminase | | |
| Exemplary | 176 | MAQKEEAAEAAAPASQNGDDLENLEDPEKLKELIDLPPFEIVTGVRLPVNFFKFQFRNVEYSSGRNKTFLCYVVEVQSKGGQA |
| amino | | QATQGYLEDEHAGAHAEEAFFNTILPAFDPALKYNVTWYVSSSPCAACADRILKTLSKTKNLRLLILVSRLEMWEEPEVQAAL |
| acid | | KKLKEAGCKLRIMKPQDFEYIWQNFVEQEEGESKAFEPWEDIQENFLYYEEKLADILK |
| sequences | | |
| for | | |
| cytidine | | |
| deaminase | | |
| Exemplary | 177 | MSSETGPVAVDPTLRRRIEPHEFEVFFDPRELRKETCLLYEINWGGRHSVWRHTSQNTSNHVEVNFLEKFTTERYFRPNTRCS |
| amino | | ITWFLSWSPCGECSRAITEFLSRHPYVTLFIYIARLYHHTDQRNRQGLRDLISSGVTIQIMTEQEYCYCWRNFVNYPPSNEAY |
| acid | | WPRYPHLWVKLYVLELYCIILGLPPCLKILRRKQPQLTFFTITLQTCHYQRIPPHLLWATGLK |
| sequences | | |
| for | | |
| cytidine | | |
| deaminase | | |
| Exemplary | 178 | MNSKTGPSVGDATLRRRIKPWEFVAFFNPQELRKETCLLYEIKWGNQNIWRHSNQNTSQHAEINFMEKFTAERHENSSVRCSI |
| amino | | TWFLSWSPCWECSKAIRKFLDHYPNVTLAIFISRLYWHMDQQHRQGLKELVHSGVTIQIMSYSEYHYCWRNFVDYPQGEEDYW |
| acid | | PKYPYLWIMLYVLELHCIILGLPPCLKISGSHSNQLALESLDLQDCHYQKIPYNVLVATGLVQPFVTWR |
| sequences | | |
| for | | |
| cytidine | | |
| deaminase | | |
| Exemplary | 179 | MTSEKGPSTGDPTLRRRIEPWEFDVFYDPRELRKEACLLYEIKWGMSRKIWRSSGKNTTNHVEVNFIKKFTSERDFHPSMSCS |
| amino | | ITWFLSWSPCWECSQAIREFLSRHPGVTLVIYVARLFWHMDQQNRQGLRDLVNSGVTIQIMRASEYYHCWRNFVNYPPGDEAH |
| acid | | WPQYPPLWMMLYALELHCIILSLPPCLKISRRWQNHLTFFRLHLQNCHYQTIPPHILLATGLIHPSVAWR |
| sequences | | |
| for | | |
| cytidine | | |
| deaminase | | |
| Exemplary | 180 | MASEKGPSNKDYTLRRRIEPWEFEVEFDPQELRKEACLLYEIKWGASSKTWRSSGKNTINHVEVNFLEKLTSEGRLGPSTCCS |
| amino | | ITWFLSWSPCWECSMAIREFLSQHPGVTLIIFVARLFQHMDRRNRQGLKDLVTSGVTVRVMSVSEYCYCWENFVNYPPGKAAQ |
| acid | | WPRYPPRWMLMYALELYCIILGLPPCLKISRRHQKQLTFFSLTPQYCHYKMIPPYILLATGLLQPSVPWR |
| sequences | | |
| for | | |
| cytidine | | |
| deaminase | | |
| Exemplary | 181 | MKVSLAGQTVDVKKILNEIPKRTVTAALLEGGEIVAVEEADDEHAERKLVRRHDVEGKVVFVTARPCLYCARELAEAGVAGVV |
| amino | | YLGRGRGLGPYYLARSGVEVVEVHPDEPLGYDPVDRLDVLLTFGGNPYLTEEDVAARVYCLLTGRGFDADIAPAPENLSGRVE |
| acid | | IMVTRGDPDEAVELLKEELPVERIRRFLISGEFDRDELRERILEDIEPRILDPFAVRARIARAGAFSSSREAEVFIGDVLTSV |
| sequences | | GREVNLNDPRTVVTVDVLGPRVSVGVEKR |
| for | | |
| cytidine | | |
| deaminase | | |
| Exemplary | 182 | MHPRFQTAFAQLADNLQSALEPILADKYFPALLTGEQVSSLKSATGLDEDALAFALLPLAAACARTPLSNENVGAIARGVSGT |
| amino | | WYFGANMEFIGATMQQTVHAEQSAISHAWLSGEKALAAITVNYTPCGHCRQEMNELNSGLDLRIHLPGREAHALRDYLPDAFG |
| acid | | PKDLEIKTLLMDEQDHGYALTGDALSQAAIAAANRSHMPYSKSPSGVALECKDGRIFSGSYAENAAFNPTLPPLQGALILLNL |
| sequences | | KGYDYPDIQRAVLAEKADAPLIQWDATSATLKALGCHSIDRVLLA |
| for | | |
| cytidine | | |
| deaminase | | |
| Exemplary | 183 | MRNRIEQALQQMPASFAPYLRELVLAKDEDATESAEQYQQLLTLSGLEDADLRVALLPIAAAYSYAPISEFYVGAIVRGISGR |
| amino | | LYLGANMEFTGAQLGQTVHAEQCAISHAWMKGEKGVADITINFSPCGHCRQFMNELTTASSLKIQLPKRAAKTLQEYLPESFG |
| acid | | PADLGIDSGLMSPVNHGKTSDDDEELIQQALRAMNISHSPYTQNFSGVALKMRSGAIYLGAYAENAAFNPSLPPLQVALAQAM |
| sequences | | MMGESFEDIEAAALVESATGKISHLADTQATLEVINPDIPLSYLSL |
| for | | |
| cytidine | | |
| deaminase | | |
| Exemplary | 184 | MSWSPCFECAEQIVRFLATHHNLSLDIFSSRLYNVQDPETQQNLCRLVQEGAQVAAMDLYEFKKCWKKFVDNGGRRFRPWKRL |
| amino | | LTNFRYQDSKLQEILRRMDPLSEEEFYSQFYNQRVKHLCYYHRMKPYLCYQLEQFNGQAPLKGCLLSEKGKQHAEILFLDKIR |
| acid | | SMELSQVTITCYLTWSPCPNCAWQLAAFKRDRPDLILHIYTSRLYFHWKRPFQKGLCSLWQSGILVDVMDLPQFTDCWTNFVN |
| sequences | | PKRPFWPWKGLEIISRRTQRRLRRIKESWGLQDLVNDFGNLQLGPPMS |
| for | | |
| cytidine | | |
| deaminase | | |
| Exemplary | 185 | MDKPSFVIQSKEAESAAKQLGVSVIQLLPSLVKPAQSYARTPISKFNVAVVGLGSSGRIFLGVNVEFPNLPLHHSIHAEQFLV |
| amino | | TNLTLNGERHLNFFAVSAAPCGHCRQFLQEIRDAPEIKILITDPNNSADSDSAADSDGFLRLGSFLPHRFGPDDLLGKDHPLL |
| acid | | LESHDNHLKISDLDSICNGNTDSSADLKQTALAAANRSYAPYSLCPSGVSLVDCDGKVYRGWYMESAAYNPSMGPVQAALVDY |
| sequences | | VANGGGGGYERIVGAVLVEKEDAVVRQEHTARLLLETISPKCEFKVFHCYEA |
| for | | |
| cytidine | | |
| deaminase | | |
| Exemplary | 186 | MVEPMDPRTFVSNENNRPILSGLNTVWLCCEVKTKDPSGPPLDAKIFQGKVYSKAKYHPEMRFLRWFHKWRQLHHDQEYKVTW |
| amino | | YVSWSPCTRCANSVATFLAKDPKVTLTIFVARLYYFWKPDYQQALRILCQKRGGPHATMKIMNYNEFQDCWNKFVDGRGKPFK |
| acid | | PRNNLPKHYTLLQATLGELLRHLMDPGTFTSNFNNKPWVSGQHETYLCYKVERLHNDTWVPLNQHRGFLRNQAPNIHGFPKGR |
| sequences | | HAELCFLDLIPFWKLDGQQYRVTCFTSWSPCFSCAQEMAKFISNNEHVSLCIFAARIYDDQGRYQEGLRALHRDGAKIAMMNY |
| for | | SEFEYCWDTFVDRQGRPFQPWDGLDEHSQALSGRLRAI |
| cytidine | | |
| deaminase | | |
| Exemplary | 187 | MKPHFRNTVERMYRDTFSYNFYNRPILSRRNTVWLCYEVKTKGPSRPRLDAKIFRGQVYSQPEHHAEMCFLSWFCGNQLPAYK |
| amino | | CFQITWFVSWTPCPDCVAKLAEFLAEHPNVTLTISAARLYYYWERDYRRALCRLSQAGARVKIMDDEEFAYCWENFVYSEGQP |
| acid | | FMPWYKFDDNYAFLHRTLKEILRNPMEAMYPHIFYFHFKNLRKAYGRNESWLCFTMEVVKHHSPVSWKRGVERNQVDPETHCH |
| sequences | | AERCFLSWFCDDILSPNTNYEVTWYTSWSPCPECAGEVAEFLARHSNVNLTIFTARLYYFWDTDYQEGLRSLSQEGASVEIMG |
| for | | YKDFKYCWENFVYNDDEPFKPWKGLKYNFLFLDSKLQEILE |
| cytidine | | |
| deaminase | | |
| Exemplary | 188 | MNPQIRNMVEQMEPDIFVYYFNNRPILSGRNTVWLCYEVKTKDPSGPPLDANIFQGKLYPEAKDHPEMKFLHWFRKWRQLHRD |
| amino | | QEYEVTWYVSWSPCTRCANSVATFLAEDPKVTLTIFVARLYYFWKPDYQQALRILCQERGGPHATMKIMNYNEFQHCWNEFVD |
| acid | | GQGKPFKPRKNLPKHYTLLHATLGELLRHVMDPGTFTSNENNKPWVSGQRETYLCYKVERSHNDTWVLLNQHRGELRNQAPDR |
| sequences | | HGFPKGRHAELCFLDLIPFWKLDDQQYRVTCFTSWSPCFSCAQKMAKFISNNKHVSLCIFAARIYDDQGRCQEGLRTLHRDGA |
| for | | KIAVMNYSEFEYCWDTFVDRQGRPFQPWDGLDEHSQALSGRLRAI |
| cytidine | | |
| deaminase | | |
| Exemplary | 189 | MNPQIRNPMERMYRDTFYDNFENEPILYGRSYTWLCYEVKIKRGRSNLLWDTGVERGQVYFKPQYHAEMCFLSWFCGNQLPAY |
| amino | | KCFQITWFVSWTPCPDCVAKLAEFLSEHPNVTLTISAARLYYYWERDYRRALCRLSQAGARVTIMDYEEFAYCWENFVYNEGQ |
| acid | | QFMPWYKEDENYAFLHRTLKEILRYLMDPDTFTENENNDPLVLRRRQTYLCYEVERLDNGTWVLMDQHMGFLCNEAKNLLCGE |
| sequences | | YGRHAELRFLDLVPSLQLDPAQIYRVTWFISWSPCFSWGCAGEVRAFLQENTHVRLRIFAARIYDYDPLYKEALQMLRDAGAQ |
| for | | VSIMTYDEFEYCWDTFVYRQGCPFQPWDGLEEHSQALSGRLRAILQNQGN |
| cytidine | | |
| deaminase | | |
| Exemplary | 190 | MKPQIRNMVEPMDPRTFVSNENNRPILSGLDTVWLCCEVKTKDPSGPPLDAKIFQGKVYPKAKYHPEMRFLRWFHKWRQLHHD |
| amino | | QEYKVTWYVSWSPCTRCANSVATFLAKDPKVTLTIFVARLYYFWKPDYQQALRILCQKRDGPHATMKIMNYNEFQDCWNKFVD |
| acid | | GRGKPFKPWNNLPKHYTLLQATLGELLRHLMDPGTFTSNENNKPWVSGQHETYLCYKVERLHNDTWVPLNQHRGELRNQAPNI |
| sequences | | HGFPKGRHAELCFLDLIPFWKLDGQQYRVTCFTSWSPCESCAQEMAKFISNNEHVSLCIFAARIYDDQGRYQEGLRTLHRDGA |
| for | | KIAMMNYSEFEYCWDTFVDRQGRPFQPWDGLDEHSQALSGRLRAILQNQGN |
| cytidine | | |
| deaminase | | |
| Exemplary | 191 | MKPHFRNTVERMYRDTFSYNFYNRPILSRRNTVWLCYEVKTKGPSRPPLDAKIFRGQVYSELKYHPEMRFFHWFSKWRKLHRD |
| amino | | QEYEVTWYISWSPCTKCTRDMATFLAEDPKVTLTIFVARLYYFWDPDYQEALRSLCQKRDGPRATMKIMNYDEFQHCWSKFVY |
| acid | | SQRELFEPWNNLPKYYILLHIMLGEILRHSMDPPTFTENENNEPWVRGRHETYLCYEVERMHNDTWVLLNQRRGFLCNQAPHK |
| sequences | | HGFLEGRHAELCFLDVIPFWKLDLDQDYRVTCFTSWSPCFSCAQEMAKFISKNKHVSLCIFTARIYDDQGRCQEGLRTLAEAG |
| for | | AKISIMTYSEFKHCWDTFVDHQGCPFQPWDGLDEHSQDLSGRLRAILQNQEN |
| cytidine | | |
| deaminase | | |
| Exemplary | 192 | MKPHERNPVERMYQDTFSDNFYNRPILSHRNTVWLCYEVKTKGPSRPPLDAKIFRGQVYSKLKYHPEMRFFHWFSKWRKLHRD |
| amino | | QEYEVTWYISWSPCTKCTRDVATFLAEDPKVTLTIFVARLYYFWDPDYQEALRSLCQKRDGPRATMKIMNYDEFQHCWSKFVY |
| acid | | SQRELFEPWNNLPKYYILLHIMLGEILRHSMDPPTFTSNENNELWVRGRHETYLCYEVERLHNDTWVLLNQRRGELCNQAPHK |
| sequences | | HGFLEGRHAELCFLDVIPFWKLDLHQDYRVTCFTSWSPCFSCAQEMAKFISNNKHVSLCIFAARIYDDQGRCQEGLRTLAKAG |
| for | | AKISIMTYSEFKHCWDTFVDHQGCPFQPWDGLEEHSQALSGRLRAILQNQGN |
| cytidine | | |
| deaminase | | |
| Exemplary | 193 | MNPQIRNPMERMYRDTFYDNFENEPILYGRSYTWLCYEVKIKRGRSNLLWDTGVFRGPVLPKRQSNHRQEVYFRFENHAEMCF |
| amino | | LSWFCGNRLPANRRFQITWFVSWNPCLPCVVKVTKFLAEHPNVTLTISAARLYYYRDRDWRWVLLRLHKAGARVKIMDYEDFA |
| acid | | YCWENFVCNEGQPFMPWYKFDDNYASLHRTLKEILRNPMEAMYPHIFYFHFKNLLKACGRNESWLCFTMEVTKHHSAVERKRG |
| sequences | | VFRNQVDPETHCHAERCFLSWFCDDILSPNTNYEVTWYTSWSPCPECAGEVAEFLARHSNVNLTIFTARLCYFWDTDYQEGLC |
| for | | SLSQEGASVKIMGYKDFVSCWKNFVYSDDEPFKPWKGLQTNERLLKRRLREILQ |
| cytidine | | |
| deaminase | | |
| Exemplary | 194 | MQPQRLGPRAGMGPFCLGCSHRKCYSPIRNLISQETFKFHFKNLGYAKGRKDTFLCYEVTRKDCDSPVSLHHGVFKNKDNIHA |
| amino | | EICFLYWFHDKVLKVLSPREEFKITWYMSWSPCFECAEQIVRFLATHHNLSLDIFSSRLYNVQDPETQQNLCRLVQEGAQVAA |
| acid | | MDLYEFKKCWKKFVDNGGRRFRPWKRLLTNFRYQDSKLQEILRRMDPLSEEEFYSQFYNQRVKHLCYYHRMKPYLCYQLEQFN |
| sequences | | GQAPLKGCLLSEKGKQHAEILFLDKIRSMELSQVTITCYLTWSPCPNCAWQLAAFKRDRPDLILHIYTSRLYFHWKRPFQKGL |
| for | | CSLWQSGILVDVMDLPQFTDCWTNFVNPKRPFWPWKGLEIISRRTQRRLRRIKESRSHAS |
| cytidine | | |
| deaminase | | |
| Exemplary | 195 | MQPQRLGPRAGMGPFCLGCSHRKCYSPIRNLISQETFKFHFKNLGYAKGRKDTFLCYEVTRKDCDSPVSLHHGVFKNKDNIHA |
| amino | | EICFLYWFHDKVLKVLSPREEFKITWYMSWSPCFECAEQIVRFLATHHNLSLDIFSSRLYNVQDPETQQNLCRLVQEGAQVAA |
| acid | | MDLYEFKKCWKKFVDNGGRRFRPWKRLLTNFRYQDSKLQEILRRMDPLSEEEFYSQFYNQRVKHLCYYHRMKPYLCYQLEQEN |
| sequences | | GQAPLKGCLLSEKGKQHAEILFLDKIRSMELSQVTITCYLTWSPCPNCAWQLAAFKRDRPDLILHIYTSRLYFHWKRPFQKGL |
| for | | CSLWQSGILVDVMDLPQFTDCWTNFVNPKRPFWPWKGLEIISRRTQRRLRRIKESWGLQDLVNDEGNLQLGPPMS |
| cytidine | | |
| deaminase | | |
| Exemplary | 196 | MGPFCLGCSHRKCYSPIRNLISQETFKFHFKNLGYAKGRKDTFLCYEVTRKDCDSPVSLHHGVFKNKDNIHAEICFLYWFHDK |
| amino | | VLKVLSPREEFKITWYMSWSPCFECAEQIVRFLATHHNLSLDIFSSRLYNVQDPETQQNLCRLVQEGAQVAAMDLYEFKKCWK |
| acid | | KFVDNGGRRFRPWKRLLTNFRYQDSKLQEILRPCYISVPSSSSSTLSNICLTKGLPETRFWVEGRRMDPLSEEEFYSQFYNQR |
| sequences | | VKHLCYYHRMKPYLCYQLEQFNGQAPLKGCLLSEKGKQHAEILFLDKIRSMELSQVTITCYLTWSPCPNCAWQLAAFKRDRPD |
| for | | LILHIYTSRLYFHWKRPFQKGLCSLWQSGILVDVMDLPQFTDCWTNFVNPKRPFWPWKGLEIISRRTQRRLRRIKESWGLQDL |
| cytidine | | VNDFGNLQLGPPMS |
| deaminase | | |
| Exemplary | 197 | MGPFCLGCSHRKCYSPIRNLISQETFKFHFKNLGYAKGRKDTFLCYEVTRKDCDSPVSLHHGVFKNKDNIHAEICFLYWFHDK |
| amino | | VLKVLSPREEFKITWYMSWSPCFECAEQIVRFLATHHNLSLDIFSSRLYNVQDPETQQNLCRLVQEGAQVAAMDLYEFKKCWK |
| acid | | KFVDNGGRRFRPWKRLLTNFRYQDSKLQEILRPCYIPVPSSSSSTLSNICLTKGLPETRFCVEGRRMDPLSEEEFYSQFYNQR |
| sequences | | VKHLCYYHRMKPYLCYQLEQFNGQAPLKGCLLSEKGKQHAEILFLDKIRSMELSQVTITCYLTWSPCPNCAWQLAAFKRDRPD |
| for | | LILHIYTSRLYFHWKRPFQKGLCSLWQSGILVDVMDLPQFTDCWTNFVNPKRPFWPWKGLEIISRRTQRRLRRIKESWGLQDL |
| cytidine | | VNDFGNLQLGPPMS |
| deaminase | | |
| Exemplary | 198 | MQPQRLGPRAGMGPFCLGCSHRKCYSPIRNLISQETFKFHFKNLGYAKGRKDTFLCYEVTRKDCDSPVSLHHGVEKNKDNIHA |
| amino | | EICFLYWFHDKVLKVLSPREEFKITWYMSWSPCFECAEQIVRFLATHHNLSLDIFSSRLYNVQDPETQQNLCRLVQEGAQVAA |
| acid | | MDLYEFKKCWKKFVDNGGRRFRPWKRLLTNFRYQDSKLQEILRPCYISVPSSSSSTLSNICLTKGLPETRFWVEGRRMDPLSE |
| sequences | | EEFYSQFYNQRVKHLCYYHRMKPYLCYQLEQFNGQAPLKGCLLSEKGKQHAEILFLDKIRSMELSQVTITCYLTWSPCPNCAW |
| for | | QLAAFKRDRPDLILHIYTSRLYFHWKRPFQKGLCSLWQSGILVDVMDLPQFTDCWTNFVNPKRPFWPWKGLEIISRRTQRRLR |
| cytidine | | RIKEVRTTLLQGPAS |
| deaminase | | |
| Exemplary | 199 | MQPQRLGPRAGMGPFCLGCSHRKCYSPIRNLISQETFKFHFKNLGYAKGRKDTFLCYEVTRKDCDSPVSLHHGVEKNKDNIHA |
| amino | | EICFLYWFHDKVLKVLSPREEFKITWYMSWSPCFECAEQIVRFLATHHNLSLDIFSSRLYNVQDPETQQNLCRLVQEGAQVAA |
| acid | | MDLYEFKKCWKKFVDNGGRRFRPWKRLLTNFRYQDSKLQEILRPCYISVPSSSSSTLSNICLTKGLPETRFWVEGRRMDPLSE |
| sequences | | EEFYSQFYNQRVKHLCYYHRMKPYLCYQLEQFNGQAPLKGCLLSEKGKQHAEILELDKIRSMELSQVTITCYLTWSPCPNCAW |
| for | | QLAAFKRDRPDLILHIYTSRLYFHWKRPFQKGLCSLWQSGILVDVMDLPQFTDCWTNFVNPKRPFWPWKGLEIISRRTQRRLR |
| cytidine | | RIKESWGLQDLVNDFGNLQLGPPMS |
| deaminase | | |
| Exemplary | 200 | MKETDQMQSLEGSGAERSVGTQTGSMTGQIPRLSKVNLFTLLSLWMELFPGVEAQGQKSQKTEEESRGPLGDNEELTRVSTEK |
| amino | | KQVKKTGLVVVKNMKIIGLHCSSEDLHTGQIALIKHGSRLKNCDLYESRKPCSACLKMIVNAGVNRISYWPSDPEISLLTEAS |
| acid | | SSEDAKLDAKAAERLKSNSRAHVCVLLQPLVCYMVQFVEETSYKCDFIQKTAKALPGADTDFYSECKQERIKEYEMLFLVSNE |
| sequences | | ERHKQILMTIGLESLCEDPYESNLRQNMKDLILLLATVASSVPNLKHFGFYCSSPEQINEIHNQSLPQEVARHCMVQARLLAY |
| for | | RTEDHKTGVGAVIWAEAKSRSCDGTGAMYFIGCGYNAFPVGSEYADEPHMDDKHKDREIRKFRYIIHAEQNALTFRCQDIKPE |
| cytidine | | ERSMIFVTKCPCDECVPLIKGAGIKQIYAGDVDVGKKKADISYMKFGELEGVRKFTWQLNPSEAYSLDPNEPERRENGVLRRR |
| deaminase | | SAKDEQRSSKRPRLETRSAGSATTACF |
| Exemplary | 201 | MSNNALQTIINARLPGEEGLWQIHLQDGKISAIDAQSGVMPITENSLDAEQGLVIPPFVEPHIHLDTTQTAGQPNWNQSGTLF |
| amino | | EGIERWAERKALLTHDDVKQRAWQTLKWQIANGIQHVRTHVDVSDATLTALKAMLEVKQEVAPWIDLQIVAFPQEGILSYPNG |
| acid | | EALLEEALRLGADVVGAIPHFEFTREYGVESLHKTFALAQKYDRLIDVHCDEIDDEQSREVETVAALAHHEGMGARVTASHTT |
| sequences | | AMHSYNGAYTSRLFRLLKMSGINFVANPLVNIHLQGREDTYPKRRGITRVKEMLESGINVCFGHDDVFDPWYPLGTANMLQVL |
| for | | HMGLHVCQLMGYGQINDGLNLITHHSARTLNLQDYGIAAGNSANLIILPAENGEDALRRQVPVRYSVRGGKVIASTQPAQTTV |
| cytidine | | YLEQPEAIDYKR |
| deaminase | | |
| Exemplary | 202 | MALLTAKTFSLQFNNKRRVNKPYYPRKALLCYQLTPQNGSTPTRGHLKNKKKDHAEIRFINKIKSMGLDETQCYQVTCYLTWS |
| amino | | PCPSCAGELVDFIKAHRHLNLRIFASRLYYHWRPNYQEGLLLLCGSQVPVEVMGLPEFTDCWENFVDHKEPPSFNPSEKLEEL |
| acid | | DKNSQAIKRRLERIKSRSVDVLENGLRSLQLGPVTPSSSIRNSR |
| sequences | | |
| for | | |
| cytidine | | |
| deaminase | | |
| Exemplary | 203 | MEKDINLKIFKGNLIFTKTSDKFTIMKDSYIVVIDGKIASVSSNLPDKYKGNPIIDERNNIIIPGMNDLHAHASQYKNLGIGM |
| amino | | DKELLPWLNNYTFPEEAKFLNVDYAKKTYGRLIKDLIKNGTTRVALFATLHKDSTIELFNMLIKSGIGAYVGKVNMDYNCPDY |
| acid | | LTENYITSLNDTEEIILKYKDKSNIVKPIITPRFVPSCSNELMDGLGKLSYKYRLPVQSHLSENLDEIAVVKSLHKKSNFYGE |
| sequences | | VYDKFGLFGNTPTLMAHCIHSSKEEINLIKRNNVTIVHCPTSNENLGSGMMPVRKYLNLGINVVLGSDISAGHTCSLEKVIAY |
| for | | AIQNSKIKWQESGKKDMFLSTSEAFYMATKKGGSFFGKVGSFEEGYDEDALVINDSNLYPEDYDLTERLERFIYLGDDRNIMK |
| cytidine | | RYVCGNEIFGPKF |
| deaminase | | |
| Exemplary | 204 | MKIINARLRRQEALFTLDLQDGIIHRITAQAAMQTADAGAIDAQGRLAIPPFVEPHIHLDATLTAGEPEWNRSGTLFEGITRW |
| amino | | SQRKASITPEDTRQRALKTIGMLRDFGVQHVRTHVDVTDPSLAALQALLAVKQEAADLIDLQIVAFPQEGIESYPNGRELMTR |
| acid | | AIEMGADVVGGIPHYENTRDKGVSSVMFLMDLAQRYGRLVDVHCDEIDDPQSRELEVLAEEARVRGMGAQVTASHTCAMGSYD |
| sequences | | NAYCSKLERLLKASGINFISCPTESIHLQGRFDSWPKRRGVTRVAELDRAGINVCFAQDSIQDPWYPLGNGNILRILDAGLHI |
| for | | CHMLGYDDLQRCLDFVTDNSARALCLGDNYGLAEGRPANLLILDAENDYEAVRRQARVLTSIRHGKVILQREVEHIRYPA |
| cytidine | | |
| deaminase | | |
| Exemplary | 205 | MGRKLDPTKEKRGPGRKARKQKGAETELVRELPAVSDENSKRLSSRARKRAAKRRLGSVEAPKTNKSPEAKPLPGKLPKGISA |
| amino | | GAVQTAGKKGPQSLFNAPRGKKRPAPGSDEEEEEEDSEEDGMVNHGDLWGSEDDADTVDDYGADSNSEDEEEGEALLPIERAA |
| acid | | RKQKAREAAAGIQWSEEETEDEEEEKEVTPESGPPKVEEADGGLQINVDEEPFVLPPAGEMEQDAQAPDLQRVHKRIQDIVGI |
| sequences | | LRDFGAQREEGRSRSEYLNRLKKDLAIYYSYGDFLLGKLMDLFPLSELVEFLEANEVPRPVTLRTNTLKTRRRDLAQALINRG |
| for | | VNLDPLGKWSKTGLVVYDSSVPIGATPEYLAGHYMLQGASSMLPVMALAPQEHERILDMCCAPGGKTSYMAQLMKNTGVILAN |
| cytidine | | DANAERLKSVVGNLHRLGVINTIISHYDGRQFPKVVGGFDRVLLDAPCSGTGVISKDPAVKTNKDEKDILRCAHLQKELLLSA |
| deaminase | | IDSVNATSKTGGYLVYCTCSITVEENEWVVDYALKKRNVRLVPTGLDFGQEGFTRFRERRFHPSLRSTRRFYPHTHNMDGFFI |
| | | AKFKKFSNSIPQSQTGNSETATPTNVDLPQVIPKSENSSQPAKKAKGAAKTKQQLQKQQHPKKASFQKLNGISKGADSELSTV |
| | | PSVTKTQASSSFQDSSQPAGKAEGIREPKVTGKLKQRSPKLQSSKKVAFLRQNAPPKGTDTQTPAVLSPSKTQATLKPKDHHQ |
| | | PLGRAKGVEKQQLPEQPFEKAAFQKQNDTPKGPQPPTVSPIRSSRPPPAKRKKSQSRGNSQLLLS |
| Exemplary | 206 | MGRRSRGRRLQQQQRPEDAEDGAEGGGKRGEAGWEGGYPEIVKENKLFEHYYQELKIVPEGEWGQEMDALREPLPATLRITGY |
| amino | | KSHAKEILHCLKNKYFKELEDLEVDGQKVEVPQPLSWYPEELAWHTNLSRKILRKSPHLEKFHQFLVSETESGNISRQEAVSM |
| acid | | IPPLLLNVRPHHKILDMCAAPGSKTTQLIEMLHADMNVPFPEGEVIANDVDNKRCYLLVHQAKRLSSPCIMVVNHDASSIPRL |
| sequences | | QIDVDGRKEILFYDRILCDVPCSGDGTMRKNIDVWKKWTTLNSLQLHGLQLRIATRGAEQLAEGGRMVYSTCSLNPIEDEAVI |
| for | | ASLLEKSEGALELADVSNELPGLKWMPGITQWKVMTKDGQWFTDWDAVPHSRHTQIRPTMFPPKDPEKLQAMHLERCLRILPH |
| cytidine | | HQNTGGFFVAVLVKKSSMPWNKRQPKLQGKSAETRESTQLSPADLTEGKPTDPSKLESPSFTGTGDTEIAHATEDLENNGSKK |
| deaminase | | DGVCGPPPSKKMKLFGFKEDPFVFIPEDDPLFPPIEKFYALDPSFPRMNLLTRTTEGKKRQLYMVSKELRNVLLNNSEKMKVI |
| | | NTGIKVWCRNNSGEEFDCAFRLAQEGIYTLYPFINSRIITVSMEDVKILLTQENPFFRKLSSETYSQAKDLAKGSIVLKYEPD |
| | | SANPDALQCPIVLCGWRGKASIRTFVPKNERLHYLRMMGLEVLGEKKKEGVILTNESAASTGQPDNDVTEGQRAGEPNSPDAE |
| | | EANSPDVTAGCDPAGVHPPR^{∧}p |
| Exemplary | 207 | MGPFCLGCSHRKCYSPIRNLISQETFKFHFKNLGYAKGRKDTFLCYEVTRKDCDSPVSLHHGVFKNKDNIHAEICFLYWFHDK |
| amino | | VLKVLSPREEFKITWYMSWSPCFECAEQIVRFLATHHNLSLDIFSSRLYNVQDPETQQNLCRLVQEGAQVAAMDLYEFKKCWK |
| acid | | KFVDNGGRRFRPWKRLLTNFRYQDSKLQEILRPCYIPVPSSSSSTLSNICLTKGLPETRFCVEGRRMDPLSEEEFYSQFYNQR |
| sequences | | VKHLCYYHRMKPYLCYQLEQFNGQAPLKGCLLSEKGKQHAEILELDKIRSMELSQVTITCYLTWSPCPNCAWQLAAFKRDRPD |
| for | | LILHIYTSRLYFHWKRPFQKGLCSLWQSGILVDVMDLPQFTDCWTNFVNPKRPFWPWKGLEIISRRTQRRLRRIKESWGLQDL |
| cytidine | | VNDFGNLQLGPPMS |
| deaminase | | |
| Exemplary | 208 | MGPFCLGCSHRKCYSPIRNLISQETFKFHFKNLRYAIDRKDTFLCYEVTRKDCDSPVSLHHGVFKNKDNIHAEICFLYWFHDK |
| amino | | VLKVLSPREEFKITWYMSWSPCFECAEQVLRFLATHHNLSLDIFSSRLYNIRDPENQQNLCRLVQEGAQVAAMDLYEFKKCWK |
| acid | | KFVDNGGRRFRPWKKLLTNFRYQDSKLQEILRPCYIPVPSSSSSTLSNICLTKGLPETRFCVERRRVHLLSEEEFYSQFYNQR |
| sequences | | VKHLCYYHGVKPYLCYQLEQFNGQAPLKGCLLSEKGKQHAEILFLDKIRSMELSQVIITCYLTWSPCPNCAWQLAAFKRDRPD |
| for | | LILHIYTSRLYFHWKRPFQKGLCSLWQSGILVDVMDLPQFTDCWTNFVNPKRPFWPWKGLEIISRRTQRRLHRIKESWGLQDL |
| cytidine | | VNDFGNLQLGPPMS |
| deaminase | | |
| Exemplary | 209 | MVEPMDPRTFVSNFNNRPILSGLNTVWLCCEVKTKDPSGPPLDAKIFQGKVYSKAKYHPEMRFLRWFHKWRQLHHDQEYKVTW |
| amino | | YVSWSPCTRCANSVATFLAKDPKVTLTIFVARLYYFWKPDYQQALRILCQKRGGPHATMKIMNYNEFQDCWNKFVDGRGKPEK |
| acid | | PRNNLPKHYTLLQATLGELLRHLMDPGTFTSNENNKPWVSGQHETYLCYKVERLHNDTWVPLNQHRGELRNQAPNIHGFPKGR |
| sequences | | HAELCFLDLIPFWKLDGQQYRVTCFTSWSPCFSCAQEMAKFISNNEHVSLCIFAARIYDDQGRYQEGLRALHRDGAKIAMMNY |
| for | | SEFEYCWDTFVDRQGRPFQPWDGLDEHSQALSGRLRAI |
| cytidine | | |
| deaminase | | |
| Exemplary | 210 | MKPHERNPVERMYQDTFSDNFYNRPILSHRNTVWLCYEVKTKGPSRPPLDAKIFRGQVYSKLKYHPEMRFFHWFSKWRKLHRD |
| amino | | QEYEVTWYISWSPCTKCTRDVATFLAEDPKVTLTIFVARLYYFWDPDYQEALRSLCQKRDGPRATMKIMNYDEFQHCWSKEVY |
| acid | | SQRELFEPWNNLPKYYILLHIMLGEILRHSMDPPTFTSNENNELWVRGRHETYLCYEVERLHNDTWVLLNQRRGFLCNQAPHK |
| sequences | | HGFLEGRHAELCFLDVIPFWKLDLHQDYRVTCFTSWSPCFSCAQEMAKFISNNKHVSLCIFAARIYDDQGRCQEGLRTLAKAG |
| for | | AKISIMTYSEFKHCWDTFVDHQGCPFQPWDGLEEHSQALSGRLRAILQNQGN |
| cytidine | | |
| deaminase | | |
| Exemplary | 211 | MNPQIRNMVEQMEPDIFVYYENNRPILSGRNTVWLCYEVKTKDPSGPPLDANIFQGKLYPEAKDHPEMKFLHWFRKWRQLHRD |
| amino | | QEYEVTWYVSWSPCTRCANSVATFLAEDPKVTLTIFVARLYYFWKPDYQQALRILCQERGGPHATMKIMNYNEFQHCWNEFVD |
| acid | | GQGKPFKPRKNLPKHYTLLHATLGELLRHVMDPGTFTSNENNKPWVSGQRETYLCYKVERSHNDTWVLLNQHRGFLRNQAPDR |
| sequences | | HGFPKGRHAELCFLDLIPFWKLDDQQYRVTCFTSWSPCFSCAQKMAKFISNNKHVSLCIFAARIYDDQGRCQEGLRTLHRDGA |
| for | | KIAVMNYSEFEYCWDTFVDRQGRPFQPWDGLDEHSQALSGRLRAI |
| cytidine | | |
| deaminase | | |
| Exemplary | 212 | MKPHFRNTVERMYRDTFSYNFYNRPILSRRNTVWLCYEVKTKGPSRPPLDAKIFRGQVYSELKYHPEMRFFHWFSKWRKLHRD |
| amino | | QEYEVTWYISWSPCTKCTRDMATFLAEDPKVTLTIFVARLYYFWDPDYQEALRSLCQKRDGPRATMKIMNYDEFQHCWSKFVY |
| acid | | SQRELFEPWNNLPKYYILLHIMLGEILRHSMDPPTFTENENNEPWVRGRHETYLCYEVERMHNDTWVLLNQRRGFLCNQAPHK |
| sequences | | HGFLEGRHAELCFLDVIPFWKLDLDQDYRVTCFTSWSPCFSCAQEMAKFISKNKHVSLCIFTARIYDDQGRCQEGLRTLAEAG |
| for | | AKISIMTYSEFKHCWDTFVDHQGCPFQPWDGLDEHSQDLSGRLRAILQNQEN |
| cytidine | | |
| deaminase | | |
| Exemplary | 213 | MKPHFRNTVERMYRDTFSYNFYNRPILSRRNTVWLCYEVKTKGPSRPRLDAKIFRGQVYSQPEHHAEMCFLSWFCGNQLPAYK |
| amino | | CFQITWFVSWTPCPDCVAKLAEFLAEHPNVTLTISAARLYYYWERDYRRALCRLSQAGARVKIMDDEEFAYCWENFVYSEGQP |
| acid | | FMPWYKFDDNYAFLHRTLKEILRNPMEAMYPHIFYFHFKNLRKAYGRNESWLCFTMEVVKHHSPVSWKRGVFRNQVDPETHCH |
| sequences | | AERCFLSWFCDDILSPNTNYEVTWYTSWSPCPECAGEVAEFLARHSNVNLTIFTARLYYFWDTDYQEGLRSLSQEGASVEIMG |
| for | | YKDFKYCWENFVYNDDEPFKPWKGLKYNFLFLDSKLQEILE |
| cytidine | | |
| deaminase | | |
| Exemplary | 214 | MNPQIRNPMERMYRDTFYDNFENEPILYGRSYTWLCYEVKIKRGRSNLLWDTGVFRGQVYFKPQYHAEMCFLSWFCGNQLPAY |
| amino | | KCFQITWFVSWTPCPDCVAKLAEFLSEHPNVTLTISAARLYYYWERDYRRALCRLSQAGARVTIMDYEEFAYCWENFVYNEGQ |
| acid | | QFMPWYKFDENYAFLHRTLKEILRYLMDPDTFTENENNDPLVLRRRQTYLCYEVERLDNGTWVLMDQHMGFLCNEAKNLLCGF |
| sequences | | YGRHAELRFLDLVPSLQLDPAQIYRVTWFISWSPCFSWGCAGEVRAFLQENTHVRLRIFAARIYDYDPLYKEALQMLRDAGAQ |
| for | | VSIMTYDEFEYCWDTFVYRQGCPFQPWDGLEEHSQALSGRLRAILQNQGN |
| cytidine | | |
| deaminase | | |
| Exemplary | 215 | MNPQIRNPMERMYRDTFYDNFENEPILYGRSYTWLCYEVKIKRGRSNLLWDTGVFRGPVLPKRQSNHRQEVYFRFENHAEMCF |
| amino | | LSWFCGNRLPANRRFQITWFVSWNPCLPCVVKVTKFLAEHPNVTLTISAARLYYYRDRDWRWVLLRLHKAGARVKIMDYEDFA |
| acid | | YCWENFVCNEGQPFMPWYKEDDNYASLHRTLKEILRNPMEAMYPHIFYFHFKNLLKACGRNESWLCFTMEVTKHHSAVERKRG |
| sequences | | VFRNQVDPETHCHAERCFLSWFCDDILSPNTNYEVTWYTSWSPCPECAGEVAEFLARHSNVNLTIFTARLCYFWDTDYQEGLC |
| for | | SLSQEGASVKIMGYKDFVSCWKNFVYSDDEPFKPWKGLQTNERLLKRRLREILQ |
| cytidine | | |
| deaminase | | |
| Exemplary | 216 | MSSETGPVAVDPTLRRRIEPHEFEVFFDPRELRKETCLLYEINWGGRHSIWRHTSQNTNKHVEVNFIEKFTTERYFCPNTRCS |
| amino | | ITWFLSWSPCGECSRAITEFLSRYPHVTLFIYIARLYHHADPRNRQGLRDLISSGVTIQIMTEQESGYCWRNEVNYSPSNEAH |
| acid | | WPRYPHLWVRLYVL ELYCIILGLPPCLNILRRKQPQLTFFTIALQSCHYQRLPPHILWATGLK |
| sequences | | |
| for | | |
| cytidine | | |
| deaminase | | |
| Exemplary | 220 | MAAFKPNSINYILGLDIGIASVGWAMVEIDEEENPIRLIDLGVRVFERAEVPKTGDSLAMARRLARSVRRLTRRRAHRLLRTR |
| amino | | RLLKREGVLQAANEDENGLIKSLPNTPWQLRAAALDRKLTPLEWSAVLLHLIKHRGYLSQRKNEGETADKELGALLKGVAGNA |
| acid | | HALQTGDERTPAELALNKFEKESGHIRNQRSDYSHTFSRKDLQAELILLFEKQKEFGNPHVSGGLKEGIETLLMTQRPALSGD |
| sequence | | AVQKMLGHCTFEPAEPKAAKNTYTAERFIWLTKLNNLRILEQGSERPLTDTERATLMDEPYRKSKLTYAQARKLLGLEDTAFF |
| of | | KGLRYGKDNAEASTLMEMKAYHAISRALEKEGLKDKKSPLNLSPELQDEIGTAFSLFKTDEDITGRLKDRIQPEILEALLKHI |
| Nme1Cas9 | | SFDKFVQISLKALRRIVPLMEQGKRYDEACAEIYGDHYGKKNTEEKIYLPPIPADEIRNPVVLRALSQARKVINGVVRRYGSP |
| cleavase | | ARIHIETAREVGKSFKDRKEIEKRQEENRKDREKAAAKFREYFPNFVGEPKSKDILKLRLYEQQHGKCLYSGKEINLGRLNEK |
| | | GYVEIDHALPFSRTWDDSFNNKVLVLGSENQNKGNQTPYEYENGKDNSREWQEFKARVETSRFPRSKKQRILLQKFDEDGEKE |
| | | RNLNDTRYVNRFLCQFVADRMRLTGKGKKRVFASNGQITNLLRGFWGLRKVRAENDRHHALDAVVVACSTVAMQQKITRFVRY |
| | | KEMNAFDGKTIDKETGEVLHQKTHFPQPWEFFAQEVMIRVFGKPDGKPEFEEADTLEKLRTLLAEKLSSRPEAVHEYVTPLFV |
| | | SRAPNRKMSGQGHMETVKSAKRLDEGVSVLRVPLTQLKLKDLEKMVNREREPKLYEALKARLEAHKDDPAKAFAEPFYKYDKA |
| | | GNRTQQVKAVRVEQVQKTGVWVRNHNGIADNATMVRVDVFEKGDKYYLVPIYSWQVAKGILPDRAVVQGKDEEDWQLIDDSFN |
| | | FKFSLHPNDLVEVITKKARMFGYFASCHRGTGNINIRIHDLDHKIGKNGILEGIGVKTALSFQKYQIDELGKEIRPCRLKKRP |
| | | PVR |
| Exemplary | 221 | GCTGCTTTTAAGCCTAATTCTATTAATTATATTCTTGGTCTTGATATTGGTATTGCTTCTGTTGGTTGGGCTATGGTTGAGAT |
| coding | | TGATGAGGAGGAGAATCCTATTCGTCTTATTGATCTTGGTGTTCGTGTTTTTGAGCGTGCTGAGGTTCCTAAGACTGGTGATT |
| sequence | | CTCTTGCTATGGCTCGTCGTCTTGCTCGTTCTGTTCGTCGTCTTACTCGTCGTCGTGCTCATCGTCTTCTTCGTACTCGTCGT |
| encoding | | CTTCTTAAGCGTGAGGGTGTTCTTCAGGCTGCTAATTTTGATGAGAATGGTCTTATTAAGTCTCTTCCTAATACTCCTTGGCA |
| Nme1Cas9 | | GCTTCGTGCTGCTGCTCTTGATCGTAAGCTTACTCCTCTTGAGTGGTCTGCTGTTCTTCTTCATCTTATTAAGCATCGTGGTT |
| cleavase | | ATCTTTCTCAGCGTAAGAATGAGGGTGAGACTGCTGATAAGGAGCTTGGTGCTCTTCTTAAGGGTGTTGCTGGTAATGCTCAT |
| | | GCTCTTCAGACTGGTGATTTTCGTACTCCTGCTGAGCTTGCTCTTAATAAGTTTGAGAAGGAGTCTGGTCATATTCGTAATCA |
| | | GCGTTCTGATTATTCTCATACTTTTTCTCGTAAGGATCTTCAGGCTGAGCTTATTCTTCTTTTTGAGAAGCAGAAGGAGTTTG |
| | | GTAATCCTCATGTTTCTGGTGGTCTTAAGGAGGGTATTGAGACTCTTCTTATGACTCAGCGTCCTGCTCTTTCTGGTGATGCT |
| | | GTTCAGAAGATGCTTGGTCATTGTACTTTTGAGCCTGCTGAGCCTAAGGCTGCTAAGAATACTTATACTGCTGAGCGTTTTAT |
| | | TTGGCTTACTAAGCTTAATAATCTTCGTATTCTTGAGCAGGGTTCTGAGCGTCCTCTTACTGATACTGAGCGTGCTACTCTTA |
| | | TGGATGAGCCTTATCGTAAGTCTAAGCTTACTTATGCTCAGGCTCGTAAGCTTCTTGGTCTTGAGGATACTGCTTTTTTTAAG |
| | | GGTCTTCGTTATGGTAAGGATAATGCTGAGGCTTCTACTCTTATGGAGATGAAGGCTTATCATGCTATTTCTCGTGCTCTTGA |
| | | GAAGGAGGGTCTTAAGGATAAGAAGTCTCCTCTTAATCTTTCTCCTGAGCTTCAGGATGAGATTGGTACTGCTTTTTCTCTTT |
| | | TTAAGACTGATGAGGATATTACTGGTCGTCTTAAGGATCGTATTCAGCCTGAGATTCTTGAGGCTCTTCTTAAGCATATTTCT |
| | | TTTGATAAGTTTGTTCAGATTTCTCTTAAGGCTCTTCGTCGTATTGTTCCTCTTATGGAGCAGGGTAAGCGTTATGATGAGGC |
| | | TTGTGCTGAGATTTATGGTGATCATTATGGTAAGAAGAATACTGAGGAGAAGATTTATCTTCCTCCTATTCCTGCTGATGAGA |
| | | TTCGTAATCCTGTTGTTCTTCGTGCTCTTTCTCAGGCTCGTAAGGTTATTAATGGTGTTGTTCGTCGTTATGGTTCTCCTGCT |
| | | CGTATTCATATTGAGACTGCTCGTGAGGTTGGTAAGTCTTTTAAGGATCGTAAGGAGATTGAGAAGCGTCAGGAGGAGAATCG |
| | | TAAGGATCGTGAGAAGGCTGCTGCTAAGTTTCGTGAGTATTTTCCTAATTTTGTTGGTGAGCCTAAGTCTAAGGATATTCTTA |
| | | AGCTTCGTCTTTATGAGCAGCAGCATGGTAAGTGTCTTTATTCTGGTAAGGAGATTAATCTTGGTCGTCTTAATGAGAAGGGT |
| | | TATGTTGAGATTGATCATGCTCTTCCTTTTTCTCGTACTTGGGATGATTCTTTTAATAATAAGGTTCTTGTTCTTGGTTCTGA |
| | | GAATCAGAATAAGGGTAATCAGACTCCTTATGAGTATTTTAATGGTAAGGATAATTCTCGTGAGTGGCAGGAGTTTAAGGCTC |
| | | GTGTTGAGACTTCTCGTTTTCCTCGTTCTAAGAAGCAGCGTATTCTTCTTCAGAAGTTTGATGAGGATGGTTTTAAGGAGCGT |
| | | AATCTTAATGATACTCGTTATGTTAATCGTTTTCTTTGTCAGTTTGTTGCTGATCGTATGCGTCTTACTGGTAAGGGTAAGAA |
| | | GCGTGTTTTTGCTTCTAATGGTCAGATTACTAATCTTCTTCGTGGTTTTTGGGGTCTTCGTAAGGTTCGTGCTGAGAATGATC |
| | | GTCATCATGCTCTTGATGCTGTTGTTGTTGCTTGTTCTACTGTTGCTATGCAGCAGAAGATTACTCGTTTTGTTCGTTATAAG |
| | | GAGATGAATGCTTTTGATGGTAAGACTATTGATAAGGAGACTGGTGAGGTTCTTCATCAGAAGACTCATTTTCCTCAGCCTTG |
| | | GGAGTTTTTTGCTCAGGAGGTTATGATTCGTGTTTTTGGTAAGCCTGATGGTAAGCCTGAGTTTGAGGAGGCTGATACTCTTG |
| | | AGAAGCTTCGTACTCTTCTTGCTGAGAAGCTTTCTTCTCGTCCTGAGGCTGTTCATGAGTATGTTACTCCTCTTTTTGTTTCT |
| | | CGTGCTCCTAATCGTAAGATGTCTGGTCAGGGTCATATGGAGACTGTTAAGTCTGCTAAGCGTCTTGATGAGGGTGTTTCTGT |
| | | TCTTCGTGTTCCTCTTACTCAGCTTAAGCTTAAGGATCTTGAGAAGATGGTTAATCGTGAGCGTGAGCCTAAGCTTTATGAGG |
| | | CTCTTAAGGCTCGTCTTGAGGCTCATAAGGATGATCCTGCTAAGGCTTTTGCTGAGCCTTTTTATAAGTATGATAAGGCTGGT |
| | | AATCGTACTCAGCAGGTTAAGGCTGTTCGTGTTGAGCAGGTTCAGAAGACTGGTGTTTGGGTTCGTAATCATAATGGTATTGC |
| | | TGATAATGCTACTATGGTTCGTGTTGATGTTTTTGAGAAGGGTGATAAGTATTATCTTGTTCCTATTTATTCTTGGCAGGTTG |
| | | CTAAGGGTATTCTTCCTGATCGTGCTGTTGTTCAGGGTAAGGATGAGGAGGATTGGCAGCTTATTGATGATTCTTTTAATTTT |
| | | AAGTTTTCTCTTCATCCTAATGATCTTGTTGAGGTTATTACTAAGAAGGCTCGTATGTTTGGTTATTTTGCTTCTTGTCATCG |
| | | TGGTACTGGTAATATTAATATTCGTATTCATGATCTTGATCATAAGATTGGTAAGAATGGTATTCTTGAGGGTATTGGTGTTA |
| | | AGACTGCTCTTTCTTTTCAGAAGTATCAGATTGATGAGCTTGGTAAGGAGATTCGTCCTTGTCGTCTTAAGAAGCGTCCTCCT |
| | | GTTCGT |
| Exemplary | 222 | GCCGCCTTCAAGCCCAACTCCATCAACTACATCCTGGGCCTGGACATCGGCATCGCCTCCGTGGGCTGGGCCATGGTGGAGAT |
| coding | | CGACGAGGAGGAGAACCCCATCCGGCTGATCGACCTGGGCGTGCGGGTGTTCGAGCGGGCCGAGGTGCCCAAGACCGGCGACT |
| sequence | | CCCTGGCCATGGCCCGGCGGCTGGCCCGGTCCGTGCGGCGGCTGACCCGGCGGCGGGCCCACCGGCTGCTGCGGACCCGGCGG |
| encoding | | CTGCTGAAGCGGGAGGGCGTGCTGCAGGCCGCCAACTTCGACGAGAACGGCCTGATCAAGTCCCTGCCCAACACCCCCTGGCA |
| Nme1Cas 9 | | GCTGCGGGCCGCCGCCCTGGACCGGAAGCTGACCCCCCTGGAGTGGTCCGCCGTGCTGCTGCACCTGATCAAGCACCGGGGCT |
| cleavase | | ACCTGTCCCAGCGGAAGAACGAGGGCGAGACCGCCGACAAGGAGCTGGGCGCCCTGCTGAAGGGCGTGGCCGGCAACGCCCAC |
| | | GCCCTGCAGACCGGCGACTTCCGGACCCCCGCCGAGCTGGCCCTGAACAAGTTCGAGAAGGAGTCCGGCCACATCCGGAACCA |
| | | GCGGTCCGACTACTCCCACACCTTCTCCCGGAAGGACCTGCAGGCCGAGCTGATCCTGCTGTTCGAGAAGCAGAAGGAGTTCG |
| | | GCAACCCCCACGTGTCCGGCGGCCTGAAGGAGGGCATCGAGACCCTGCTGATGACCCAGCGGCCCGCCCTGTCCGGCGACGCC |
| | | GTGCAGAAGATGCTGGGCCACTGCACCTTCGAGCCCGCCGAGCCCAAGGCCGCCAAGAACACCTACACCGCCGAGCGGTTCAT |
| | | CTGGCTGACCAAGCTGAACAACCTGCGGATCCTGGAGCAGGGCTCCGAGCGGCCCCTGACCGACACCGAGCGGGCCACCCTGA |
| | | TGGACGAGCCCTACCGGAAGTCCAAGCTGACCTACGCCCAGGCCCGGAAGCTGCTGGGCCTGGAGGACACCGCCTTCTTCAAG |
| | | GGCCTGCGGTACGGCAAGGACAACGCCGAGGCCTCCACCCTGATGGAGATGAAGGCCTACCACGCCATCTCCCGGGCCCTGGA |
| | | GAAGGAGGGCCTGAAGGACAAGAAGTCCCCCCTGAACCTGTCCCCCGAGCTGCAGGACGAGATCGGCACCGCCTTCTCCCTGT |
| | | TCAAGACCGACGAGGACATCACCGGCCGGCTGAAGGACCGGATCCAGCCCGAGATCCTGGAGGCCCTGCTGAAGCACATCTCC |
| | | TTCGACAAGTTCGTGCAGATCTCCCTGAAGGCCCTGCGGCGGATCGTGCCCCTGATGGAGCAGGGCAAGCGGTACGACGAGGC |
| | | CTGCGCCGAGATCTACGGCGACCACTACGGCAAGAAGAACACCGAGGAGAAGATCTACCTGCCCCCCATCCCCGCCGACGAGA |
| | | TCCGGAACCCCGTGGTGCTGCGGGCCCTGTCCCAGGCCCGGAAGGTGATCAACGGCGTGGTGCGGCGGTACGGCTCCCCCGCC |
| | | CGGATCCACATCGAGACCGCCCGGGAGGTGGGCAAGTCCTTCAAGGACCGGAAGGAGATCGAGAAGCGGCAGGAGGAGAACCG |
| | | GAAGGACCGGGAGAAGGCCGCCGCCAAGTTCCGGGAGTACTTCCCCAACTTCGTGGGCGAGCCCAAGTCCAAGGACATCCTGA |
| | | AGCTGCGGCTGTACGAGCAGCAGCACGGCAAGTGCCTGTACTCCGGCAAGGAGATCAACCTGGGCCGGCTGAACGAGAAGGGC |
| | | TACGTGGAGATCGACCACGCCCTGCCCTTCTCCCGGACCTGGGACGACTCCTTCAACAACAAGGTGCTGGTGCTGGGCTCCGA |
| | | GAACCAGAACAAGGGCAACCAGACCCCCTACGAGTACTTCAACGGCAAGGACAACTCCCGGGAGTGGCAGGAGTTCAAGGCCC |
| | | GGGTGGAGACCTCCCGGTTCCCCCGGTCCAAGAAGCAGCGGATCCTGCTGCAGAAGTTCGACGAGGACGGCTTCAAGGAGCGG |
| | | AACCTGAACGACACCCGGTACGTGAACCGGTTCCTGTGCCAGTTCGTGGCCGACCGGATGCGGCTGACCGGCAAGGGCAAGAA |
| | | GCGGGTGTTCGCCTCCAACGGCCAGATCACCAACCTGCTGCGGGGCTTCTGGGGCCTGCGGAAGGTGCGGGCCGAGAACGACC |
| | | GGCACCACGCCCTGGACGCCGTGGTGGTGGCCTGCTCCACCGTGGCCATGCAGCAGAAGATCACCCGGTTCGTGCGGTACAAG |
| | | GAGATGAACGCCTTCGACGGCAAGACCATCGACAAGGAGACCGGCGAGGTGCTGCACCAGAAGACCCACTTCCCCCAGCCCTG |
| | | GGAGTTCTTCGCCCAGGAGGTGATGATCCGGGTGTTCGGCAAGCCCGACGGCAAGCCCGAGTTCGAGGAGGCCGACACCCTGG |
| | | AGAAGCTGCGGACCCTGCTGGCCGAGAAGCTGTCCTCCCGGCCCGAGGCCGTGCACGAGTACGTGACCCCCCTGTTCGTGTCC |
| | | CGGGCCCCCAACCGGAAGATGTCCGGCCAGGGCCACATGGAGACCGTGAAGTCCGCCAAGCGGCTGGACGAGGGCGTGTCCGT |
| | | GCTGCGGGTGCCCCTGACCCAGCTGAAGCTGAAGGACCTGGAGAAGATGGTGAACCGGGAGCGGGAGCCCAAGCTGTACGAGG |
| | | CCCTGAAGGCCCGGCTGGAGGCCCACAAGGACGACCCCGCCAAGGCCTTCGCCGAGCCCTTCTACAAGTACGACAAGGCCGGC |
| | | AACCGGACCCAGCAGGTGAAGGCCGTGCGGGTGGAGCAGGTGCAGAAGACCGGCGTGTGGGTGCGGAACCACAACGGCATCGC |
| | | CGACAACGCCACCATGGTGCGGGTGGACGTGTTCGAGAAGGGCGACAAGTACTACCTGGTGCCCATCTACTCCTGGCAGGTGG |
| | | CCAAGGGCATCCTGCCCGACCGGGCCGTGGTGCAGGGCAAGGACGAGGAGGACTGGCAGCTGATCGACGACTCCTTCAACTTC |
| | | AAGTTCTCCCTGCACCCCAACGACCTGGTGGAGGTGATCACCAAGAAGGCCCGGATGTTCGGCTACTTCGCCTCCTGCCACCG |
| | | GGGCACCGGCAACATCAACATCCGGATCCACGACCTGGACCACAAGATCGGCAAGAACGGCATCCTGGAGGGCATCGGCGTGA |
| | | AGACCGCCCTGTCCTTCCAGAAGTACCAGATCGACGAGCTGGGCAAGGAGATCCGGCCCTGCCGGCTGAAGAAGCGGCCCCCC |
| | | GTGCGG |
| Exemplary | 223 | GCAGCATTCAAACCAAACTCAATCAACTACATCCTAGGACTAGACATCGGAATCGCATCAGTAGGATGAGCAATGGTAGAAAT |
| coding | | CGACGAAGAAGAAAACCCAATCCGACTAATCGACCTAGGAGTACGAGTATTCGAACGAGCAGAAGTACCAAAAACAGGAGACT |
| sequence | | CACTAGCAATGGCACGACGACTAGCACGATCAGTACGACGACTAACACGACGACGAGCACACCGACTACTACGAACACGACGA |
| encoding | | CTACTAAAACGAGAAGGAGTACTACAAGCAGCAAACTTCGACGAAAACGGACTAATCAAATCACTACCAAACACACCATGACA |
| Nme1Cas9 | | ACTACGAGCAGCAGCACTAGACCGAAAACTAACACCACTAGAATGATCAGCAGTACTACTACACCTAATCAAACACCGAGGAT |
| cleavase | | ACCTATCACAACGAAAAAACGAAGGAGAAACAGCAGACAAAGAACTAGGAGCACTACTAAAAGGAGTAGCAGGAAACGCACAC |
| | | GCACTACAAACAGGAGACTTCCGAACACCAGCAGAACTAGCACTAAACAAATTCGAAAAAGAATCAGGACACATCCGAAACCA |
| | | ACGATCAGACTACTCACACACATTCTCACGAAAAGACCTACAAGCAGAACTAATCCTACTATTCGAAAAACAAAAAGAATTCG |
| | | GAAACCCACACGTATCAGGAGGACTAAAAGAAGGAATCGAAACACTACTAATGACACAACGACCAGCACTATCAGGAGACGCA |
| | | GTACAAAAAATGCTAGGACACTGCACATTCGAACCAGCAGAACCAAAAGCAGCAAAAAACACATACACAGCAGAACGATTCAT |
| | | CTGACTAACAAAACTAAACAACCTACGAATCCTAGAACAAGGATCAGAACGACCACTAACAGACACAGAACGAGCAACACTAA |
| | | TGGACGAACCATACCGAAAATCAAAACTAACATACGCACAAGCACGAAAACTACTAGGACTAGAAGACACAGCATTCTTCAAA |
| | | GGACTACGATACGGAAAAGACAACGCAGAAGCATCAACACTAATGGAAATGAAAGCATACCACGCAATCTCACGAGCACTAGA |
| | | AAAAGAAGGACTAAAAGACAAAAAATCACCACTAAACCTATCACCAGAACTACAAGACGAAATCGGAACAGCATTCTCACTAT |
| | | TCAAAACAGACGAAGACATCACAGGACGACTAAAAGACCGAATCCAACCAGAAATCCTAGAAGCACTACTAAAACACATCTCA |
| | | TTCGACAAATTCGTACAAATCTCACTAAAAGCACTACGACGAATCGTACCACTAATGGAACAAGGAAAACGATACGACGAAGC |
| | | ATGCGCAGAAATCTACGGAGACCACTACGGAAAAAAAAACACAGAAGAAAAAATCTACCTACCACCAATCCCAGCAGACGAAA |
| | | TCCGAAACCCAGTAGTACTACGAGCACTATCACAAGCACGAAAAGTAATCAACGGAGTAGTACGACGATACGGATCACCAGCA |
| | | CGAATCCACATCGAAACAGCACGAGAAGTAGGAAAATCATTCAAAGACCGAAAAGAAATCGAAAAACGACAAGAAGAAAACCG |
| | | AAAAGACCGAGAAAAAGCAGCAGCAAAATTCCGAGAATACTTCCCAAACTTCGTAGGAGAACCAAAATCAAAAGACATCCTAA |
| | | AACTACGACTATACGAACAACAACACGGAAAATGCCTATACTCAGGAAAAGAAATCAACCTAGGACGACTAAACGAAAAAGGA |
| | | TACGTAGAAATCGACCACGCACTACCATTCTCACGAACATGAGACGACTCATTCAACAACAAAGTACTAGTACTAGGATCAGA |
| | | AAACCAAAACAAAGGAAACCAAACACCATACGAATACTTCAACGGAAAAGACAACTCACGAGAATGACAAGAATTCAAAGCAC |
| | | GAGTAGAAACATCACGATTCCCACGATCAAAAAAACAACGAATCCTACTACAAAAATTCGACGAAGACGGATTCAAAGAACGA |
| | | AACCTAAACGACACACGATACGTAAACCGATTCCTATGCCAATTCGTAGCAGACCGAATGCGACTAACAGGAAAAGGAAAAAA |
| | | ACGAGTATTCGCATCAAACGGACAAATCACAAACCTACTACGAGGATTCTGAGGACTACGAAAAGTACGAGCAGAAAACGACC |
| | | GACACCACGCACTAGACGCAGTAGTAGTAGCATGCTCAACAGTAGCAATGCAACAAAAAATCACACGATTCGTACGATACAAA |
| | | GAAATGAACGCATTCGACGGAAAAACAATCGACAAAGAAACAGGAGAAGTACTACACCAAAAAACACACTTCCCACAACCATG |
| | | AGAATTCTTCGCACAAGAAGTAATGATCCGAGTATTCGGAAAACCAGACGGAAAACCAGAATTCGAAGAAGCAGACACACTAG |
| | | AAAAACTACGAACACTACTAGCAGAAAAACTATCATCACGACCAGAAGCAGTACACGAATACGTAACACCACTATTCGTATCA |
| | | CGAGCACCAAACCGAAAAATGTCAGGACAAGGACACATGGAAACAGTAAAATCAGCAAAACGACTAGACGAAGGAGTATCAGT |
| | | ACTACGAGTACCACTAACACAACTAAAACTAAAAGACCTAGAAAAAATGGTAAACCGAGAACGAGAACCAAAACTATACGAAG |
| | | CACTAAAAGCACGACTAGAAGCACACAAAGACGACCCAGCAAAAGCATTCGCAGAACCATTCTACAAATACGACAAAGCAGGA |
| | | AACCGAACACAACAAGTAAAAGCAGTACGAGTAGAACAAGTACAAAAAACAGGAGTATGAGTACGAAACCACAACGGAATCGC |
| | | AGACAACGCAACAATGGTACGAGTAGACGTATTCGAAAAAGGAGACAAATACTACCTAGTACCAATCTACTCATGACAAGTAG |
| | | CAAAAGGAATCCTACCAGACCGAGCAGTAGTACAAGGAAAAGACGAAGAAGACTGACAACTAATCGACGACTCATTCAACTTC |
| | | AAATTCTCACTACACCCAAACGACCTAGTAGAAGTAATCACAAAAAAAGCACGAATGTTCGGATACTTCGCATCATGCCACCG |
| | | AGGAACAGGAAACATCAACATCCGAATCCACGACCTAGACCACAAAATCGGAAAAAACGGAATCCTAGAAGGAATCGGAGTAA |
| | | AAACAGCACTATCATTCCAAAAATACCAAATCGACGAACTAGGAAAAGAAATCCGACCATGCCGACTAAAAAAACGACCACCA |
| | | GTACGA |
| Exemplary | 224 | ATGGCTGCTTTTAAGCCTAATTCTATTAATTATATTCTTGGTCTTGATATTGGTATTGCTTCTGTTGGTTGGGCTATGGTTGA |
| open | | GATTGATGAGGAGGAGAATCCTATTCGTCTTATTGATCTTGGTGTTCGTGTTTTTGAGCGTGCTGAGGTTCCTAAGACTGGTG |
| reading | | ATTCTCTTGCTATGGCTCGTCGTCTTGCTCGTTCTGTTCGTCGTCTTACTCGTCGTCGTGCTCATCGTCTTCTTCGTACTCGT |
| frame for | | CGTCTTCTTAAGCGTGAGGGTGTTCTTCAGGCTGCTAATTTTGATGAGAATGGTCTTATTAAGTCTCTTCCTAATACTCCTTG |
| Nme1Cas9 | | GCAGCTTCGTGCTGCTGCTCTTGATCGTAAGCTTACTCCTCTTGAGTGGTCTGCTGTTCTTCTTCATCTTATTAAGCATCGTG |
| cleavase | | GTTATCTTTCTCAGCGTAAGAATGAGGGTGAGACTGCTGATAAGGAGCTTGGTGCTCTTCTTAAGGGTGTTGCTGGTAATGCT |
| | | CATGCTCTTCAGACTGGTGATTTTCGTACTCCTGCTGAGCTTGCTCTTAATAAGTTTGAGAAGGAGTCTGGTCATATTCGTAA |
| | | TCAGCGTTCTGATTATTCTCATACTTTTTCTCGTAAGGATCTTCAGGCTGAGCTTATTCTTCTTTTTGAGAAGCAGAAGGAGT |
| | | TTGGTAATCCTCATGTTTCTGGTGGTCTTAAGGAGGGTATTGAGACTCTTCTTATGACTCAGCGTCCTGCTCTTTCTGGTGAT |
| | | GCTGTTCAGAAGATGCTTGGTCATTGTACTTTTGAGCCTGCTGAGCCTAAGGCTGCTAAGAATACTTATACTGCTGAGCGTTT |
| | | TATTTGGCTTACTAAGCTTAATAATCTTCGTATTCTTGAGCAGGGTTCTGAGCGTCCTCTTACTGATACTGAGCGTGCTACTC |
| | | TTATGGATGAGCCTTATCGTAAGTCTAAGCTTACTTATGCTCAGGCTCGTAAGCTTCTTGGTCTTGAGGATACTGCTTTTTTT |
| | | AAGGGTCTTCGTTATGGTAAGGATAATGCTGAGGCTTCTACTCTTATGGAGATGAAGGCTTATCATGCTATTTCTCGTGCTCT |
| | | TGAGAAGGAGGGTCTTAAGGATAAGAAGTCTCCTCTTAATCTTTCTCCTGAGCTTCAGGATGAGATTGGTACTGCTTTTTCTC |
| | | TTTTTAAGACTGATGAGGATATTACTGGTCGTCTTAAGGATCGTATTCAGCCTGAGATTCTTGAGGCTCTTCTTAAGCATATT |
| | | TCTTTTGATAAGTTTGTTCAGATTTCTCTTAAGGCTCTTCGTCGTATTGTTCCTCTTATGGAGCAGGGTAAGCGTTATGATGA |
| | | GGCTTGTGCTGAGATTTATGGTGATCATTATGGTAAGAAGAATACTGAGGAGAAGATTTATCTTCCTCCTATTCCTGCTGATG |
| | | AGATTCGTAATCCTGTTGTTCTTCGTGCTCTTTCTCAGGCTCGTAAGGTTATTAATGGTGTTGTTCGTCGTTATGGTTCTCCT |
| | | GCTCGTATTCATATTGAGACTGCTCGTGAGGTTGGTAAGTCTTTTAAGGATCGTAAGGAGATTGAGAAGCGTCAGGAGGAGAA |
| | | TCGTAAGGATCGTGAGAAGGCTGCTGCTAAGTTTCGTGAGTATTTTCCTAATTTTGTTGGTGAGCCTAAGTCTAAGGATATTC |
| | | TTAAGCTTCGTCTTTATGAGCAGCAGCATGGTAAGTGTCTTTATTCTGGTAAGGAGATTAATCTTGGTCGTCTTAATGAGAAG |
| | | GGTTATGTTGAGATTGATCATGCTCTTCCTTTTTCTCGTACTTGGGATGATTCTTTTAATAATAAGGTTCTTGTTCTTGGTTC |
| | | TGAGAATCAGAATAAGGGTAATCAGACTCCTTATGAGTATTTTAATGGTAAGGATAATTCTCGTGAGTGGCAGGAGTTTAAGG |
| | | CTCGTGTTGAGACTTCTCGTTTTCCTCGTTCTAAGAAGCAGCGTATTCTTCTTCAGAAGTTTGATGAGGATGGTTTTAAGGAG |
| | | CGTAATCTTAATGATACTCGTTATGTTAATCGTTTTCTTTGTCAGTTTGTTGCTGATCGTATGCGTCTTACTGGTAAGGGTAA |
| | | GAAGCGTGTTTTTGCTTCTAATGGTCAGATTACTAATCTTCTTCGTGGTTTTTGGGGTCTTCGTAAGGTTCGTGCTGAGAATG |
| | | ATCGTCATCATGCTCTTGATGCTGTTGTTGTTGCTTGTTCTACTGTTGCTATGCAGCAGAAGATTACTCGTTTTGTTCGTTAT |
| | | AAGGAGATGAATGCTTTTGATGGTAAGACTATTGATAAGGAGACTGGTGAGGTTCTTCATCAGAAGACTCATTTTCCTCAGCC |
| | | TTGGGAGTTTTTTGCTCAGGAGGTTATGATTCGTGTTTTTGGTAAGCCTGATGGTAAGCCTGAGTTTGAGGAGGCTGATACTC |
| | | TTGAGAAGCTTCGTACTCTTCTTGCTGAGAAGCTTTCTTCTCGTCCTGAGGCTGTTCATGAGTATGTTACTCCTCTTTTTGTT |
| | | TCTCGTGCTCCTAATCGTAAGATGTCTGGTCAGGGTCATATGGAGACTGTTAAGTCTGCTAAGCGTCTTGATGAGGGTGTTTC |
| | | TGTTCTTCGTGTTCCTCTTACTCAGCTTAAGCTTAAGGATCTTGAGAAGATGGTTAATCGTGAGCGTGAGCCTAAGCTTTATG |
| | | AGGCTCTTAAGGCTCGTCTTGAGGCTCATAAGGATGATCCTGCTAAGGCTTTTGCTGAGCCTTTTTATAAGTATGATAAGGCT |
| | | GGTAATCGTACTCAGCAGGTTAAGGCTGTTCGTGTTGAGCAGGTTCAGAAGACTGGTGTTTGGGTTCGTAATCATAATGGTAT |
| | | TGCTGATAATGCTACTATGGTTCGTGTTGATGTTTTTGAGAAGGGTGATAAGTATTATCTTGTTCCTATTTATTCTTGGCAGG |
| | | TTGCTAAGGGTATTCTTCCTGATCGTGCTGTTGTTCAGGGTAAGGATGAGGAGGATTGGCAGCTTATTGATGATTCTTTTAAT |
| | | TTTAAGTTTTCTCTTCATCCTAATGATCTTGTTGAGGTTATTACTAAGAAGGCTCGTATGTTTGGTTATTTTGCTTCTTGTCA |
| | | TCGTGGTACTGGTAATATTAATATTCGTATTCATGATCTTGATCATAAGATTGGTAAGAATGGTATTCTTGAGGGTATTGGTG |
| | | TTAAGACTGCTCTTTCTTTTCAGAAGTATCAGATTGATGAGCTTGGTAAGGAGATTCGTCCTTGTCGTCTTAAGAAGCGTCCT |
| | | CCTGTTCGTUGA |
| Exemplary | 225 | ATGGCCGCCTTCAAGCCCAACTCCATCAACTACATCCTGGGCCTGGACATCGGCATCGCCTCCGTGGGCTGGGCCATGGTGGA |
| open | | GATCGACGAGGAGGAGAACCCCATCCGGCTGATCGACCTGGGCGTGCGGGTGTTCGAGCGGGCCGAGGTGCCCAAGACCGGCG |
| reading | | ACTCCCTGGCCATGGCCCGGCGGCTGGCCCGGTCCGTGCGGCGGCTGACCCGGCGGCGGGCCCACCGGCTGCTGCGGACCCGG |
| frame for | | CGGCTGCTGAAGCGGGAGGGCGTGCTGCAGGCCGCCAACTTCGACGAGAACGGCCTGATCAAGTCCCTGCCCAACACCCCCTG |
| Nme1Cas9 | | GCAGCTGCGGGCCGCCGCCCTGGACCGGAAGCTGACCCCCCTGGAGTGGTCCGCCGTGCTGCTGCACCTGATCAAGCACCGGG |
| cleavase | | GCTACCTGTCCCAGCGGAAGAACGAGGGCGAGACCGCCGACAAGGAGCTGGGCGCCCTGCTGAAGGGCGTGGCCGGCAACGCC |
| | | CACGCCCTGCAGACCGGCGACTTCCGGACCCCCGCCGAGCTGGCCCTGAACAAGTTCGAGAAGGAGTCCGGCCACATCCGGAA |
| | | CCAGCGGTCCGACTACTCCCACACCTTCTCCCGGAAGGACCTGCAGGCCGAGCTGATCCTGCTGTTCGAGAAGCAGAAGGAGT |
| | | TCGGCAACCCCCACGTGTCCGGCGGCCTGAAGGAGGGCATCGAGACCCTGCTGATGACCCAGCGGCCCGCCCTGTCCGGCGAC |
| | | GCCGTGCAGAAGATGCTGGGCCACTGCACCTTCGAGCCCGCCGAGCCCAAGGCCGCCAAGAACACCTACACCGCCGAGCGGTT |
| | | CATCTGGCTGACCAAGCTGAACAACCTGCGGATCCTGGAGCAGGGCTCCGAGCGGCCCCTGACCGACACCGAGCGGGCCACCC |
| | | TGATGGACGAGCCCTACCGGAAGTCCAAGCTGACCTACGCCCAGGCCCGGAAGCTGCTGGGCCTGGAGGACACCGCCTTCTTC |
| | | AAGGGCCTGCGGTACGGCAAGGACAACGCCGAGGCCTCCACCCTGATGGAGATGAAGGCCTACCACGCCATCTCCCGGGCCCT |
| | | GGAGAAGGAGGGCCTGAAGGACAAGAAGTCCCCCCTGAACCTGTCCCCCGAGCTGCAGGACGAGATCGGCACCGCCTTCTCCC |
| | | TGTTCAAGACCGACGAGGACATCACCGGCCGGCTGAAGGACCGGATCCAGCCCGAGATCCTGGAGGCCCTGCTGAAGCACATC |
| | | TCCTTCGACAAGTTCGTGCAGATCTCCCTGAAGGCCCTGCGGCGGATCGTGCCCCTGATGGAGCAGGGCAAGCGGTACGACGA |
| | | GGCCTGCGCCGAGATCTACGGCGACCACTACGGCAAGAAGAACACCGAGGAGAAGATCTACCTGCCCCCCATCCCCGCCGACG |
| | | AGATCCGGAACCCCGTGGTGCTGCGGGCCCTGTCCCAGGCCCGGAAGGTGATCAACGGCGTGGTGCGGCGGTACGGCTCCCCC |
| | | GCCCGGATCCACATCGAGACCGCCCGGGAGGTGGGCAAGTCCTTCAAGGACCGGAAGGAGATCGAGAAGCGGCAGGAGGAGAA |
| | | CCGGAAGGACCGGGAGAAGGCCGCCGCCAAGTTCCGGGAGTACTTCCCCAACTTCGTGGGCGAGCCCAAGTCCAAGGACATCC |
| | | TGAAGCTGCGGCTGTACGAGCAGCAGCACGGCAAGTGCCTGTACTCCGGCAAGGAGATCAACCTGGGCCGGCTGAACGAGAAG |
| | | GGCTACGTGGAGATCGACCACGCCCTGCCCTTCTCCCGGACCTGGGACGACTCCTTCAACAACAAGGTGCTGGTGCTGGGCTC |
| | | CGAGAACCAGAACAAGGGCAACCAGACCCCCTACGAGTACTTCAACGGCAAGGACAACTCCCGGGAGTGGCAGGAGTTCAAGG |
| | | CCCGGGTGGAGACCTCCCGGTTCCCCCGGTCCAAGAAGCAGCGGATCCTGCTGCAGAAGTTCGACGAGGACGGCTTCAAGGAG |
| | | CGGAACCTGAACGACACCCGGTACGTGAACCGGTTCCTGTGCCAGTTCGTGGCCGACCGGATGCGGCTGACCGGCAAGGGCAA |
| | | GAAGCGGGTGTTCGCCTCCAACGGCCAGATCACCAACCTGCTGCGGGGCTTCTGGGGCCTGCGGAAGGTGCGGGCCGAGAACG |
| | | ACCGGCACCACGCCCTGGACGCCGTGGTGGTGGCCTGCTCCACCGTGGCCATGCAGCAGAAGATCACCCGGTTCGTGCGGTAC |
| | | AAGGAGATGAACGCCTTCGACGGCAAGACCATCGACAAGGAGACCGGCGAGGTGCTGCACCAGAAGACCCACTTCCCCCAGCC |
| | | CTGGGAGTTCTTCGCCCAGGAGGTGATGATCCGGGTGTTCGGCAAGCCCGACGGCAAGCCCGAGTTCGAGGAGGCCGACACCC |
| | | TGGAGAAGCTGCGGACCCTGCTGGCCGAGAAGCTGTCCTCCCGGCCCGAGGCCGTGCACGAGTACGTGACCCCCCTGTTCGTG |
| | | TCCCGGGCCCCCAACCGGAAGATGTCCGGCCAGGGCCACATGGAGACCGTGAAGTCCGCCAAGCGGCTGGACGAGGGCGTGTC |
| | | CGTGCTGCGGGTGCCCCTGACCCAGCTGAAGCTGAAGGACCTGGAGAAGATGGTGAACCGGGAGCGGGAGCCCAAGCTGTACG |
| | | AGGCCCTGAAGGCCCGGCTGGAGGCCCACAAGGACGACCCCGCCAAGGCCTTCGCCGAGCCCTTCTACAAGTACGACAAGGCC |
| | | GGCAACCGGACCCAGCAGGTGAAGGCCGTGCGGGTGGAGCAGGTGCAGAAGACCGGCGTGTGGGTGCGGAACCACAACGGCAT |
| | | CGCCGACAACGCCACCATGGTGCGGGTGGACGTGTTCGAGAAGGGCGACAAGTACTACCTGGTGCCCATCTACTCCTGGCAGG |
| | | TGGCCAAGGGCATCCTGCCCGACCGGGCCGTGGTGCAGGGCAAGGACGAGGAGGACTGGCAGCTGATCGACGACTCCTTCAAC |
| | | TTCAAGTTCTCCCTGCACCCCAACGACCTGGTGGAGGTGATCACCAAGAAGGCCCGGATGTTCGGCTACTTCGCCTCCTGCCA |
| | | CCGGGGCACCGGCAACATCAACATCCGGATCCACGACCTGGACCACAAGATCGGCAAGAACGGCATCCTGGAGGGCATCGGCG |
| | | TGAAGACCGCCCTGTCCTTCCAGAAGTACCAGATCGACGAGCTGGGCAAGGAGATCCGGCCCTGCCGGCTGAAGAAGCGGCCC |
| | | CCCGTGCGGUGA |
| Exemplary | 226 | ATGGCAGCATTCAAACCAAACTCAATCAACTACATCCTAGGACTAGACATCGGAATCGCATCAGTAGGATGAGCAATGGTAGA |
| open | | AATCGACGAAGAAGAAAACCCAATCCGACTAATCGACCTAGGAGTACGAGTATTCGAACGAGCAGAAGTACCAAAAACAGGAG |
| reading | | ACTCACTAGCAATGGCACGACGACTAGCACGATCAGTACGACGACTAACACGACGACGAGCACACCGACTACTACGAACACGA |
| frame for | | CGACTACTAAAACGAGAAGGAGTACTACAAGCAGCAAACTTCGACGAAAACGGACTAATCAAATCACTACCAAACACACCATG |
| Nme1Cas9 | | ACAACTACGAGCAGCAGCACTAGACCGAAAACTAACACCACTAGAATGATCAGCAGTACTACTACACCTAATCAAACACCGAG |
| cleavase | | GATACCTATCACAACGAAAAAACGAAGGAGAAACAGCAGACAAAGAACTAGGAGCACTACTAAAAGGAGTAGCAGGAAACGCA |
| | | CACGCACTACAAACAGGAGACTTCCGAACACCAGCAGAACTAGCACTAAACAAATTCGAAAAAGAATCAGGACACATCCGAAA |
| | | CCAACGATCAGACTACTCACACACATTCTCACGAAAAGACCTACAAGCAGAACTAATCCTACTATTCGAAAAACAAAAAGAAT |
| | | TCGGAAACCCACACGTATCAGGAGGACTAAAAGAAGGAATCGAAACACTACTAATGACACAACGACCAGCACTATCAGGAGAC |
| | | GCAGTACAAAAAATGCTAGGACACTGCACATTCGAACCAGCAGAACCAAAAGCAGCAAAAAACACATACACAGCAGAACGATT |
| | | CATCTGACTAACAAAACTAAACAACCTACGAATCCTAGAACAAGGATCAGAACGACCACTAACAGACACAGAACGAGCAACAC |
| | | TAATGGACGAACCATACCGAAAATCAAAACTAACATACGCACAAGCACGAAAACTACTAGGACTAGAAGACACAGCATTCTTC |
| | | AAAGGACTACGATACGGAAAAGACAACGCAGAAGCATCAACACTAATGGAAATGAAAGCATACCACGCAATCTCACGAGCACT |
| | | AGAAAAAGAAGGACTAAAAGACAAAAAATCACCACTAAACCTATCACCAGAACTACAAGACGAAATCGGAACAGCATTCTCAC |
| | | TATTCAAAACAGACGAAGACATCACAGGACGACTAAAAGACCGAATCCAACCAGAAATCCTAGAAGCACTACTAAAACACATC |
| | | TCATTCGACAAATTCGTACAAATCTCACTAAAAGCACTACGACGAATCGTACCACTAATGGAACAAGGAAAACGATACGACGA |
| | | AGCATGCGCAGAAATCTACGGAGACCACTACGGAAAAAAAAACACAGAAGAAAAAATCTACCTACCACCAATCCCAGCAGACG |
| | | AAATCCGAAACCCAGTAGTACTACGAGCACTATCACAAGCACGAAAAGTAATCAACGGAGTAGTACGACGATACGGATCACCA |
| | | GCACGAATCCACATCGAAACAGCACGAGAAGTAGGAAAATCATTCAAAGACCGAAAAGAAATCGAAAAACGACAAGAAGAAAA |
| | | CCGAAAAGACCGAGAAAAAGCAGCAGCAAAATTCCGAGAATACTTCCCAAACTTCGTAGGAGAACCAAAATCAAAAGACATCC |
| | | TAAAACTACGACTATACGAACAACAACACGGAAAATGCCTATACTCAGGAAAAGAAATCAACCTAGGACGACTAAACGAAAAA |
| | | GGATACGTAGAAATCGACCACGCACTACCATTCTCACGAACATGAGACGACTCATTCAACAACAAAGTACTAGTACTAGGATC |
| | | AGAAAACCAAAACAAAGGAAACCAAACACCATACGAATACTTCAACGGAAAAGACAACTCACGAGAATGACAAGAATTCAAAG |
| | | CACGAGTAGAAACATCACGATTCCCACGATCAAAAAAACAACGAATCCTACTACAAAAATTCGACGAAGACGGATTCAAAGAA |
| | | CGAAACCTAAACGACACACGATACGTAAACCGATTCCTATGCCAATTCGTAGCAGACCGAATGCGACTAACAGGAAAAGGAAA |
| | | AAAACGAGTATTCGCATCAAACGGACAAATCACAAACCTACTACGAGGATTCTGAGGACTACGAAAAGTACGAGCAGAAAACG |
| | | ACCGACACCACGCACTAGACGCAGTAGTAGTAGCATGCTCAACAGTAGCAATGCAACAAAAAATCACACGATTCGTACGATAC |
| | | AAAGAAATGAACGCATTCGACGGAAAAACAATCGACAAAGAAACAGGAGAAGTACTACACCAAAAAACACACTTCCCACAACC |
| | | ATGAGAATTCTTCGCACAAGAAGTAATGATCCGAGTATTCGGAAAACCAGACGGAAAACCAGAATTCGAAGAAGCAGACACAC |
| | | TAGAAAAACTACGAACACTACTAGCAGAAAAACTATCATCACGACCAGAAGCAGTACACGAATACGTAACACCACTATTCGTA |
| | | TCACGAGCACCAAACCGAAAAATGTCAGGACAAGGACACATGGAAACAGTAAAATCAGCAAAACGACTAGACGAAGGAGTATC |
| | | AGTACTACGAGTACCACTAACACAACTAAAACTAAAAGACCTAGAAAAAATGGTAAACCGAGAACGAGAACCAAAACTATACG |
| | | AAGCACTAAAAGCACGACTAGAAGCACACAAAGACGACCCAGCAAAAGCATTCGCAGAACCATTCTACAAATACGACAAAGCA |
| | | GGAAACCGAACACAACAAGTAAAAGCAGTACGAGTAGAACAAGTACAAAAAACAGGAGTATGAGTACGAAACCACAACGGAAT |
| | | CGCAGACAACGCAACAATGGTACGAGTAGACGTATTCGAAAAAGGAGACAAATACTACCTAGTACCAATCTACTCATGACAAG |
| | | TAGCAAAAGGAATCCTACCAGACCGAGCAGTAGTACAAGGAAAAGACGAAGAAGACTGACAACTAATCGACGACTCATTCAAC |
| | | TTCAAATTCTCACTACACCCAAACGACCTAGTAGAAGTAATCACAAAAAAAGCACGAATGTTCGGATACTTCGCATCATGCCA |
| | | CCGAGGAACAGGAAACATCAACATCCGAATCCACGACCTAGACCACAAAATCGGAAAAAACGGAATCCTAGAAGGAATCGGAG |
| | | TAAAAACAGCACTATCATTCCAAAAATACCAAATCGACGAACTAGGAAAAGAAATCCGACCATGCCGACTAAAAAAACGACCA |
| | | CCAGTACGAUAA |
| Exemplary | 227 | MAAFKPNSINYILGLAIGIASVGWAMVEIDEEENPIRLIDLGVRVFERAEVPKTGDSLAMARRLARSVRRLTRRRAHRLLRTR |
| amino | | RLLKREGVLQAANFDENGLIKSLPNTPWQLRAAALDRKLTPLEWSAVLLHLIKHRGYLSQRKNEGETADKELGALLKGVAGNA |
| acid | | HALQTGDFRTPAELALNKFEKESGHIRNQRSDYSHTFSRKDLQAELILLFEKQKEFGNPHVSGGLKEGIETLLMTQRPALSGD |
| sequence | | AVQKMLGHCTFEPAEPKAAKNTYTAERFIWLTKLNNLRILEQGSERPLTDTERATLMDEPYRKSKLTYAQARKLLGLEDTAFF |
| of | | KGLRYGKDNAEASTLMEMKAYHAISRALEKEGLKDKKSPLNLSPELQDEIGTAFSLFKTDEDITGRLKDRIQPEILEALLKHI |
| Nme1Cas9 | | SFDKFVQISLKALRRIVPLMEQGKRYDEACAEIYGDHYGKKNTEEKIYLPPIPADEIRNPVVLRALSQARKVINGVVRRYGSP |
| dCas9 | | ARIHIETAREVGKSFKDRKEIEKRQEENRKDREKAAAKFREYFPNFVGEPKSKDILKLRLYEQQHGKCLYSGKEINLGRLNEK |
| | | GYVEIDAALPFSRTWDDSFNNKVLVLGSENQNKGNQTPYEYENGKDNSREWQEFKARVETSRFPRSKKQRILLQKFDEDGEKE |
| | | RNLNDTRYVNRFLCQFVADRMRLTGKGKKRVFASNGQITNLLRGFWGLRKVRAENDRHHALDAVVVACSTVAMQQKITRFVRY |
| | | KEMNAFDGKTIDKETGEVLHQKTHFPQPWEFFAQEVMIRVFGKPDGKPEFEEADTLEKLRTLLAEKLSSRPEAVHEYVTPLFV |
| | | SRAPNRKMSGQGHMETVKSAKRLDEGVSVLRVPLTQLKLKDLEKMVNREREPKLYEALKARLEAHKDDPAKAFAEPFYKYDKA |
| | | GNRTQQVKAVRVEQVQKTGVWVRNHNGIADNATMVRVDVFEKGDKYYLVPIYSWQVAKGILPDRAVVQGKDEEDWQLIDDSFN |
| | | FKFSLHPNDLVEVITKKARMFGYFASCHRGTGNINIRIHDLDHKIGKNGILEGIGVKTALSFQKYQIDELGKEIRPCRLKKRP |
| | | PVR |
| Exemplary | 228 | GCTGCTTTTAAGCCTAATTCTATTAATTATATTCTTGGTCTTGCTATTGGTATTGCTTCTGTTGGTTGGGCTATGGTTGAGAT |
| coding | | TGATGAGGAGGAGAATCCTATTCGTCTTATTGATCTTGGTGTTCGTGTTTTTGAGCGTGCTGAGGTTCCTAAGACTGGTGATT |
| sequence | | CTCTTGCTATGGCTCGTCGTCTTGCTCGTTCTGTTCGTCGTCTTACTCGTCGTCGTGCTCATCGTCTTCTTCGTACTCGTCGT |
| encoding | | CTTCTTAAGCGTGAGGGTGTTCTTCAGGCTGCTAATTTTGATGAGAATGGTCTTATTAAGTCTCTTCCTAATACTCCTTGGCA |
| Nme1Cas9 | | GCTTCGTGCTGCTGCTCTTGATCGTAAGCTTACTCCTCTTGAGTGGTCTGCTGTTCTTCTTCATCTTATTAAGCATCGTGGTT |
| dCas9 | | ATCTTTCTCAGCGTAAGAATGAGGGTGAGACTGCTGATAAGGAGCTTGGTGCTCTTCTTAAGGGTGTTGCTGGTAATGCTCAT |
| | | GCTCTTCAGACTGGTGATTTTCGTACTCCTGCTGAGCTTGCTCTTAATAAGTTTGAGAAGGAGTCTGGTCATATTCGTAATCA |
| | | GCGTTCTGATTATTCTCATACTTTTTCTCGTAAGGATCTTCAGGCTGAGCTTATTCTTCTTTTTGAGAAGCAGAAGGAGTTTG |
| | | GTAATCCTCATGTTTCTGGTGGTCTTAAGGAGGGTATTGAGACTCTTCTTATGACTCAGCGTCCTGCTCTTTCTGGTGATGCT |
| | | GTTCAGAAGATGCTTGGTCATTGTACTTTTGAGCCTGCTGAGCCTAAGGCTGCTAAGAATACTTATACTGCTGAGCGTTTTAT |
| | | TTGGCTTACTAAGCTTAATAATCTTCGTATTCTTGAGCAGGGTTCTGAGCGTCCTCTTACTGATACTGAGCGTGCTACTCTTA |
| | | TGGATGAGCCTTATCGTAAGTCTAAGCTTACTTATGCTCAGGCTCGTAAGCTTCTTGGTCTTGAGGATACTGCTTTTTTTAAG |
| | | GGTCTTCGTTATGGTAAGGATAATGCTGAGGCTTCTACTCTTATGGAGATGAAGGCTTATCATGCTATTTCTCGTGCTCTTGA |
| | | GAAGGAGGGTCTTAAGGATAAGAAGTCTCCTCTTAATCTTTCTCCTGAGCTTCAGGATGAGATTGGTACTGCTTTTTCTCTTT |
| | | TTAAGACTGATGAGGATATTACTGGTCGTCTTAAGGATCGTATTCAGCCTGAGATTCTTGAGGCTCTTCTTAAGCATATTTCT |
| | | TTTGATAAGTTTGTTCAGATTTCTCTTAAGGCTCTTCGTCGTATTGTTCCTCTTATGGAGCAGGGTAAGCGTTATGATGAGGC |
| | | TTGTGCTGAGATTTATGGTGATCATTATGGTAAGAAGAATACTGAGGAGAAGATTTATCTTCCTCCTATTCCTGCTGATGAGA |
| | | TTCGTAATCCTGTTGTTCTTCGTGCTCTTTCTCAGGCTCGTAAGGTTATTAATGGTGTTGTTCGTCGTTATGGTTCTCCTGCT |
| | | CGTATTCATATTGAGACTGCTCGTGAGGTTGGTAAGTCTTTTAAGGATCGTAAGGAGATTGAGAAGCGTCAGGAGGAGAATCG |
| | | TAAGGATCGTGAGAAGGCTGCTGCTAAGTTTCGTGAGTATTTTCCTAATTTTGTTGGTGAGCCTAAGTCTAAGGATATTCTTA |
| | | AGCTTCGTCTTTATGAGCAGCAGCATGGTAAGTGTCTTTATTCTGGTAAGGAGATTAATCTTGGTCGTCTTAATGAGAAGGGT |
| | | TATGTTGAGATTGATGCTGCTCTTCCTTTTTCTCGTACTTGGGATGATTCTTTTAATAATAAGGTTCTTGTTCTTGGTTCTGA |
| | | GAATCAGAATAAGGGTAATCAGACTCCTTATGAGTATTTTAATGGTAAGGATAATTCTCGTGAGTGGCAGGAGTTTAAGGCTC |
| | | GTGTTGAGACTTCTCGTTTTCCTCGTTCTAAGAAGCAGCGTATTCTTCTTCAGAAGTTTGATGAGGATGGTTTTAAGGAGCGT |
| | | AATCTTAATGATACTCGTTATGTTAATCGTTTTCTTTGTCAGTTTGTTGCTGATCGTATGCGTCTTACTGGTAAGGGTAAGAA |
| | | GCGTGTTTTTGCTTCTAATGGTCAGATTACTAATCTTCTTCGTGGTTTTTGGGGTCTTCGTAAGGTTCGTGCTGAGAATGATC |
| | | GTCATCATGCTCTTGATGCTGTTGTTGTTGCTTGTTCTACTGTTGCTATGCAGCAGAAGATTACTCGTTTTGTTCGTTATAAG |
| | | GAGATGAATGCTTTTGATGGTAAGACTATTGATAAGGAGACTGGTGAGGTTCTTCATCAGAAGACTCATTTTCCTCAGCCTTG |
| | | GGAGTTTTTTGCTCAGGAGGTTATGATTCGTGTTTTTGGTAAGCCTGATGGTAAGCCTGAGTTTGAGGAGGCTGATACTCTTG |
| | | AGAAGCTTCGTACTCTTCTTGCTGAGAAGCTTTCTTCTCGTCCTGAGGCTGTTCATGAGTATGTTACTCCTCTTTTTGTTTCT |
| | | CGTGCTCCTAATCGTAAGATGTCTGGTCAGGGTCATATGGAGACTGTTAAGTCTGCTAAGCGTCTTGATGAGGGTGTTTCTGT |
| | | TCTTCGTGTTCCTCTTACTCAGCTTAAGCTTAAGGATCTTGAGAAGATGGTTAATCGTGAGCGTGAGCCTAAGCTTTATGAGG |
| | | CTCTTAAGGCTCGTCTTGAGGCTCATAAGGATGATCCTGCTAAGGCTTTTGCTGAGCCTTTTTATAAGTATGATAAGGCTGGT |
| | | AATCGTACTCAGCAGGTTAAGGCTGTTCGTGTTGAGCAGGTTCAGAAGACTGGTGTTTGGGTTCGTAATCATAATGGTATTGC |
| | | TGATAATGCTACTATGGTTCGTGTTGATGTTTTTGAGAAGGGTGATAAGTATTATCTTGTTCCTATTTATTCTTGGCAGGTTG |
| | | CTAAGGGTATTCTTCCTGATCGTGCTGTTGTTCAGGGTAAGGATGAGGAGGATTGGCAGCTTATTGATGATTCTTTTAATTTT |
| | | AAGTTTTCTCTTCATCCTAATGATCTTGTTGAGGTTATTACTAAGAAGGCTCGTATGTTTGGTTATTTTGCTTCTTGTCATCG |
| | | TGGTACTGGTAATATTAATATTCGTATTCATGATCTTGATCATAAGATTGGTAAGAATGGTATTCTTGAGGGTATTGGTGTTA |
| | | AGACTGCTCTTTCTTTTCAGAAGTATCAGATTGATGAGCTTGGTAAGGAGATTCGTCCTTGTCGTCTTAAGAAGCGTCCTCCT |
| | | GTTCGT |
| Exemplary | 229 | GCCGCCTTCAAGCCCAACTCCATCAACTACATCCTGGGCCTGGCCATCGGCATCGCCTCCGTGGGCTGGGCCATGGTGGAGAT |
| coding | | CGACGAGGAGGAGAACCCCATCCGGCTGATCGACCTGGGCGTGCGGGTGTTCGAGCGGGCCGAGGTGCCCAAGACCGGCGACT |
| sequence | | CCCTGGCCATGGCCCGGCGGCTGGCCCGGTCCGTGCGGCGGCTGACCCGGCGGCGGGCCCACCGGCTGCTGCGGACCCGGCGG |
| encoding | | CTGCTGAAGCGGGAGGGCGTGCTGCAGGCCGCCAACTTCGACGAGAACGGCCTGATCAAGTCCCTGCCCAACACCCCCTGGCA |
| Nme1Cas9 | | GCTGCGGGCCGCCGCCCTGGACCGGAAGCTGACCCCCCTGGAGTGGTCCGCCGTGCTGCTGCACCTGATCAAGCACCGGGGCT |
| dCas9 | | ACCTGTCCCAGCGGAAGAACGAGGGCGAGACCGCCGACAAGGAGCTGGGCGCCCTGCTGAAGGGCGTGGCCGGCAACGCCCAC |
| | | GCCCTGCAGACCGGCGACTTCCGGACCCCCGCCGAGCTGGCCCTGAACAAGTTCGAGAAGGAGTCCGGCCACATCCGGAACCA |
| | | GCGGTCCGACTACTCCCACACCTTCTCCCGGAAGGACCTGCAGGCCGAGCTGATCCTGCTGTTCGAGAAGCAGAAGGAGTTCG |
| | | GCAACCCCCACGTGTCCGGCGGCCTGAAGGAGGGCATCGAGACCCTGCTGATGACCCAGCGGCCCGCCCTGTCCGGCGACGCC |
| | | GTGCAGAAGATGCTGGGCCACTGCACCTTCGAGCCCGCCGAGCCCAAGGCCGCCAAGAACACCTACACCGCCGAGCGGTTCAT |
| | | CTGGCTGACCAAGCTGAACAACCTGCGGATCCTGGAGCAGGGCTCCGAGCGGCCCCTGACCGACACCGAGCGGGCCACCCTGA |
| | | TGGACGAGCCCTACCGGAAGTCCAAGCTGACCTACGCCCAGGCCCGGAAGCTGCTGGGCCTGGAGGACACCGCCTTCTTCAAG |
| | | GGCCTGCGGTACGGCAAGGACAACGCCGAGGCCTCCACCCTGATGGAGATGAAGGCCTACCACGCCATCTCCCGGGCCCTGGA |
| | | GAAGGAGGGCCTGAAGGACAAGAAGTCCCCCCTGAACCTGTCCCCCGAGCTGCAGGACGAGATCGGCACCGCCTTCTCCCTGT |
| | | TCAAGACCGACGAGGACATCACCGGCCGGCTGAAGGACCGGATCCAGCCCGAGATCCTGGAGGCCCTGCTGAAGCACATCTCC |
| | | TTCGACAAGTTCGTGCAGATCTCCCTGAAGGCCCTGCGGCGGATCGTGCCCCTGATGGAGCAGGGCAAGCGGTACGACGAGGC |
| | | CTGCGCCGAGATCTACGGCGACCACTACGGCAAGAAGAACACCGAGGAGAAGATCTACCTGCCCCCCATCCCCGCCGACGAGA |
| | | TCCGGAACCCCGTGGTGCTGCGGGCCCTGTCCCAGGCCCGGAAGGTGATCAACGGCGTGGTGCGGCGGTACGGCTCCCCCGCC |
| | | CGGATCCACATCGAGACCGCCCGGGAGGTGGGCAAGTCCTTCAAGGACCGGAAGGAGATCGAGAAGCGGCAGGAGGAGAACCG |
| | | GAAGGACCGGGAGAAGGCCGCCGCCAAGTTCCGGGAGTACTTCCCCAACTTCGTGGGCGAGCCCAAGTCCAAGGACATCCTGA |
| | | AGCTGCGGCTGTACGAGCAGCAGCACGGCAAGTGCCTGTACTCCGGCAAGGAGATCAACCTGGGCCGGCTGAACGAGAAGGGC |
| | | TACGTGGAGATCGACGCCGCCCTGCCCTTCTCCCGGACCTGGGACGACTCCTTCAACAACAAGGTGCTGGTGCTGGGCTCCGA |
| | | GAACCAGAACAAGGGCAACCAGACCCCCTACGAGTACTTCAACGGCAAGGACAACTCCCGGGAGTGGCAGGAGTTCAAGGCCC |
| | | GGGTGGAGACCTCCCGGTTCCCCCGGTCCAAGAAGCAGCGGATCCTGCTGCAGAAGTTCGACGAGGACGGCTTCAAGGAGCGG |
| | | AACCTGAACGACACCCGGTACGTGAACCGGTTCCTGTGCCAGTTCGTGGCCGACCGGATGCGGCTGACCGGCAAGGGCAAGAA |
| | | GCGGGTGTTCGCCTCCAACGGCCAGATCACCAACCTGCTGCGGGGCTTCTGGGGCCTGCGGAAGGTGCGGGCCGAGAACGACC |
| | | GGCACCACGCCCTGGACGCCGTGGTGGTGGCCTGCTCCACCGTGGCCATGCAGCAGAAGATCACCCGGTTCGTGCGGTACAAG |
| | | GAGATGAACGCCTTCGACGGCAAGACCATCGACAAGGAGACCGGCGAGGTGCTGCACCAGAAGACCCACTTCCCCCAGCCCTG |
| | | GGAGTTCTTCGCCCAGGAGGTGATGATCCGGGTGTTCGGCAAGCCCGACGGCAAGCCCGAGTTCGAGGAGGCCGACACCCTGG |
| | | AGAAGCTGCGGACCCTGCTGGCCGAGAAGCTGTCCTCCCGGCCCGAGGCCGTGCACGAGTACGTGACCCCCCTGTTCGTGTCC |
| | | CGGGCCCCCAACCGGAAGATGTCCGGCCAGGGCCACATGGAGACCGTGAAGTCCGCCAAGCGGCTGGACGAGGGCGTGTCCGT |
| | | GCTGCGGGTGCCCCTGACCCAGCTGAAGCTGAAGGACCTGGAGAAGATGGTGAACCGGGAGCGGGAGCCCAAGCTGTACGAGG |
| | | CCCTGAAGGCCCGGCTGGAGGCCCACAAGGACGACCCCGCCAAGGCCTTCGCCGAGCCCTTCTACAAGTACGACAAGGCCGGC |
| | | AACCGGACCCAGCAGGTGAAGGCCGTGCGGGTGGAGCAGGTGCAGAAGACCGGCGTGTGGGTGCGGAACCACAACGGCATCGC |
| | | CGACAACGCCACCATGGTGCGGGTGGACGTGTTCGAGAAGGGCGACAAGTACTACCTGGTGCCCATCTACTCCTGGCAGGTGG |
| | | CCAAGGGCATCCTGCCCGACCGGGCCGTGGTGCAGGGCAAGGACGAGGAGGACTGGCAGCTGATCGACGACTCCTTCAACTTC |
| | | AAGTTCTCCCTGCACCCCAACGACCTGGTGGAGGTGATCACCAAGAAGGCCCGGATGTTCGGCTACTTCGCCTCCTGCCACCG |
| | | GGGCACCGGCAACATCAACATCCGGATCCACGACCTGGACCACAAGATCGGCAAGAACGGCATCCTGGAGGGCATCGGCGTGA |
| | | AGACCGCCCTGTCCTTCCAGAAGTACCAGATCGACGAGCTGGGCAAGGAGATCCGGCCCTGCCGGCTGAAGAAGCGGCCCCCC |
| | | GTGCGG |
| Exemplary | 230 | GCAGCATTCAAACCAAACTCAATCAACTACATCCTAGGACTAGCAATCGGAATCGCATCAGTAGGATGAGCAATGGTAGAAAT |
| coding | | CGACGAAGAAGAAAACCCAATCCGACTAATCGACCTAGGAGTACGAGTATTCGAACGAGCAGAAGTACCAAAAACAGGAGACT |
| sequence | | CACTAGCAATGGCACGACGACTAGCACGATCAGTACGACGACTAACACGACGACGAGCACACCGACTACTACGAACACGACGA |
| encoding | | CTACTAAAACGAGAAGGAGTACTACAAGCAGCAAACTTCGACGAAAACGGACTAATCAAATCACTACCAAACACACCATGACA |
| Nme1Cas9 | | ACTACGAGCAGCAGCACTAGACCGAAAACTAACACCACTAGAATGATCAGCAGTACTACTACACCTAATCAAACACCGAGGAT |
| dCas9 | | ACCTATCACAACGAAAAAACGAAGGAGAAACAGCAGACAAAGAACTAGGAGCACTACTAAAAGGAGTAGCAGGAAACGCACAC |
| | | GCACTACAAACAGGAGACTTCCGAACACCAGCAGAACTAGCACTAAACAAATTCGAAAAAGAATCAGGACACATCCGAAACCA |
| | | ACGATCAGACTACTCACACACATTCTCACGAAAAGACCTACAAGCAGAACTAATCCTACTATTCGAAAAACAAAAAGAATTCG |
| | | GAAACCCACACGTATCAGGAGGACTAAAAGAAGGAATCGAAACACTACTAATGACACAACGACCAGCACTATCAGGAGACGCA |
| | | GTACAAAAAATGCTAGGACACTGCACATTCGAACCAGCAGAACCAAAAGCAGCAAAAAACACATACACAGCAGAACGATTCAT |
| | | CTGACTAACAAAACTAAACAACCTACGAATCCTAGAACAAGGATCAGAACGACCACTAACAGACACAGAACGAGCAACACTAA |
| | | TGGACGAACCATACCGAAAATCAAAACTAACATACGCACAAGCACGAAAACTACTAGGACTAGAAGACACAGCATTCTTCAAA |
| | | GGACTACGATACGGAAAAGACAACGCAGAAGCATCAACACTAATGGAAATGAAAGCATACCACGCAATCTCACGAGCACTAGA |
| | | AAAAGAAGGACTAAAAGACAAAAAATCACCACTAAACCTATCACCAGAACTACAAGACGAAATCGGAACAGCATTCTCACTAT |
| | | TCAAAACAGACGAAGACATCACAGGACGACTAAAAGACCGAATCCAACCAGAAATCCTAGAAGCACTACTAAAACACATCTCA |
| | | TTCGACAAATTCGTACAAATCTCACTAAAAGCACTACGACGAATCGTACCACTAATGGAACAAGGAAAACGATACGACGAAGC |
| | | ATGCGCAGAAATCTACGGAGACCACTACGGAAAAAAAAACACAGAAGAAAAAATCTACCTACCACCAATCCCAGCAGACGAAA |
| | | TCCGAAACCCAGTAGTACTACGAGCACTATCACAAGCACGAAAAGTAATCAACGGAGTAGTACGACGATACGGATCACCAGCA |
| | | CGAATCCACATCGAAACAGCACGAGAAGTAGGAAAATCATTCAAAGACCGAAAAGAAATCGAAAAACGACAAGAAGAAAACCG |
| | | AAAAGACCGAGAAAAAGCAGCAGCAAAATTCCGAGAATACTTCCCAAACTTCGTAGGAGAACCAAAATCAAAAGACATCCTAA |
| | | AACTACGACTATACGAACAACAACACGGAAAATGCCTATACTCAGGAAAAGAAATCAACCTAGGACGACTAAACGAAAAAGGA |
| | | TACGTAGAAATCGACGCAGCACTACCATTCTCACGAACATGAGACGACTCATTCAACAACAAAGTACTAGTACTAGGATCAGA |
| | | AAACCAAAACAAAGGAAACCAAACACCATACGAATACTTCAACGGAAAAGACAACTCACGAGAATGACAAGAATTCAAAGCAC |
| | | GAGTAGAAACATCACGATTCCCACGATCAAAAAAACAACGAATCCTACTACAAAAATTCGACGAAGACGGATTCAAAGAACGA |
| | | AACCTAAACGACACACGATACGTAAACCGATTCCTATGCCAATTCGTAGCAGACCGAATGCGACTAACAGGAAAAGGAAAAAA |
| | | ACGAGTATTCGCATCAAACGGACAAATCACAAACCTACTACGAGGATTCTGAGGACTACGAAAAGTACGAGCAGAAAACGACC |
| | | GACACCACGCACTAGACGCAGTAGTAGTAGCATGCTCAACAGTAGCAATGCAACAAAAAATCACACGATTCGTACGATACAAA |
| | | GAAATGAACGCATTCGACGGAAAAACAATCGACAAAGAAACAGGAGAAGTACTACACCAAAAAACACACTTCCCACAACCATG |
| | | AGAATTCTTCGCACAAGAAGTAATGATCCGAGTATTCGGAAAACCAGACGGAAAACCAGAATTCGAAGAAGCAGACACACTAG |
| | | AAAAACTACGAACACTACTAGCAGAAAAACTATCATCACGACCAGAAGCAGTACACGAATACGTAACACCACTATTCGTATCA |
| | | CGAGCACCAAACCGAAAAATGTCAGGACAAGGACACATGGAAACAGTAAAATCAGCAAAACGACTAGACGAAGGAGTATCAGT |
| | | ACTACGAGTACCACTAACACAACTAAAACTAAAAGACCTAGAAAAAATGGTAAACCGAGAACGAGAACCAAAACTATACGAAG |
| | | CACTAAAAGCACGACTAGAAGCACACAAAGACGACCCAGCAAAAGCATTCGCAGAACCATTCTACAAATACGACAAAGCAGGA |
| | | AACCGAACACAACAAGTAAAAGCAGTACGAGTAGAACAAGTACAAAAAACAGGAGTATGAGTACGAAACCACAACGGAATCGC |
| | | AGACAACGCAACAATGGTACGAGTAGACGTATTCGAAAAAGGAGACAAATACTACCTAGTACCAATCTACTCATGACAAGTAG |
| | | CAAAAGGAATCCTACCAGACCGAGCAGTAGTACAAGGAAAAGACGAAGAAGACTGACAACTAATCGACGACTCATTCAACTTC |
| | | AAATTCTCACTACACCCAAACGACCTAGTAGAAGTAATCACAAAAAAAGCACGAATGTTCGGATACTTCGCATCATGCCACCG |
| | | AGGAACAGGAAACATCAACATCCGAATCCACGACCTAGACCACAAAATCGGAAAAAACGGAATCCTAGAAGGAATCGGAGTAA |
| | | AAACAGCACTATCATTCCAAAAATACCAAATCGACGAACTAGGAAAAGAAATCCGACCATGCCGACTAAAAAAACGACCACCA |
| | | GTACGA |
| Exemplary | 231 | ATGGCTGCTTTTAAGCCTAATTCTATTAATTATATTCTTGGTCTTGCTATTGGTATTGCTTCTGTTGGTTGGGCTATGGTTGA |
| open | | GATTGATGAGGAGGAGAATCCTATTCGTCTTATTGATCTTGGTGTTCGTGTTTTTGAGCGTGCTGAGGTTCCTAAGACTGGTG |
| reading | | ATTCTCTTGCTATGGCTCGTCGTCTTGCTCGTTCTGTTCGTCGTCTTACTCGTCGTCGTGCTCATCGTCTTCTTCGTACTCGT |
| frame for | | CGTCTTCTTAAGCGTGAGGGTGTTCTTCAGGCTGCTAATTTTGATGAGAATGGTCTTATTAAGTCTCTTCCTAATACTCCTTG |
| Nme1Cas9 | | GCAGCTTCGTGCTGCTGCTCTTGATCGTAAGCTTACTCCTCTTGAGTGGTCTGCTGTTCTTCTTCATCTTATTAAGCATCGTG |
| dCas9 | | GTTATCTTTCTCAGCGTAAGAATGAGGGTGAGACTGCTGATAAGGAGCTTGGTGCTCTTCTTAAGGGTGTTGCTGGTAATGCT |
| | | CATGCTCTTCAGACTGGTGATTTTCGTACTCCTGCTGAGCTTGCTCTTAATAAGTTTGAGAAGGAGTCTGGTCATATTCGTAA |
| | | TCAGCGTTCTGATTATTCTCATACTTTTTCTCGTAAGGATCTTCAGGCTGAGCTTATTCTTCTTTTTGAGAAGCAGAAGGAGT |
| | | TTGGTAATCCTCATGTTTCTGGTGGTCTTAAGGAGGGTATTGAGACTCTTCTTATGACTCAGCGTCCTGCTCTTTCTGGTGAT |
| | | GCTGTTCAGAAGATGCTTGGTCATTGTACTTTTGAGCCTGCTGAGCCTAAGGCTGCTAAGAATACTTATACTGCTGAGCGTTT |
| | | TATTTGGCTTACTAAGCTTAATAATCTTCGTATTCTTGAGCAGGGTTCTGAGCGTCCTCTTACTGATACTGAGCGTGCTACTC |
| | | TTATGGATGAGCCTTATCGTAAGTCTAAGCTTACTTATGCTCAGGCTCGTAAGCTTCTTGGTCTTGAGGATACTGCTTTTTTT |
| | | AAGGGTCTTCGTTATGGTAAGGATAATGCTGAGGCTTCTACTCTTATGGAGATGAAGGCTTATCATGCTATTTCTCGTGCTCT |
| | | TGAGAAGGAGGGTCTTAAGGATAAGAAGTCTCCTCTTAATCTTTCTCCTGAGCTTCAGGATGAGATTGGTACTGCTTTTTCTC |
| | | TTTTTAAGACTGATGAGGATATTACTGGTCGTCTTAAGGATCGTATTCAGCCTGAGATTCTTGAGGCTCTTCTTAAGCATATT |
| | | TCTTTTGATAAGTTTGTTCAGATTTCTCTTAAGGCTCTTCGTCGTATTGTTCCTCTTATGGAGCAGGGTAAGCGTTATGATGA |
| | | GGCTTGTGCTGAGATTTATGGTGATCATTATGGTAAGAAGAATACTGAGGAGAAGATTTATCTTCCTCCTATTCCTGCTGATG |
| | | AGATTCGTAATCCTGTTGTTCTTCGTGCTCTTTCTCAGGCTCGTAAGGTTATTAATGGTGTTGTTCGTCGTTATGGTTCTCCT |
| | | GCTCGTATTCATATTGAGACTGCTCGTGAGGTTGGTAAGTCTTTTAAGGATCGTAAGGAGATTGAGAAGCGTCAGGAGGAGAA |
| | | TCGTAAGGATCGTGAGAAGGCTGCTGCTAAGTTTCGTGAGTATTTTCCTAATTTTGTTGGTGAGCCTAAGTCTAAGGATATTC |
| | | TTAAGCTTCGTCTTTATGAGCAGCAGCATGGTAAGTGTCTTTATTCTGGTAAGGAGATTAATCTTGGTCGTCTTAATGAGAAG |
| | | GGTTATGTTGAGATTGATGCTGCTCTTCCTTTTTCTCGTACTTGGGATGATTCTTTTAATAATAAGGTTCTTGTTCTTGGTTC |
| | | TGAGAATCAGAATAAGGGTAATCAGACTCCTTATGAGTATTTTAATGGTAAGGATAATTCTCGTGAGTGGCAGGAGTTTAAGG |
| | | CTCGTGTTGAGACTTCTCGTTTTCCTCGTTCTAAGAAGCAGCGTATTCTTCTTCAGAAGTTTGATGAGGATGGTTTTAAGGAG |
| | | CGTAATCTTAATGATACTCGTTATGTTAATCGTTTTCTTTGTCAGTTTGTTGCTGATCGTATGCGTCTTACTGGTAAGGGTAA |
| | | GAAGCGTGTTTTTGCTTCTAATGGTCAGATTACTAATCTTCTTCGTGGTTTTTGGGGTCTTCGTAAGGTTCGTGCTGAGAATG |
| | | ATCGTCATCATGCTCTTGATGCTGTTGTTGTTGCTTGTTCTACTGTTGCTATGCAGCAGAAGATTACTCGTTTTGTTCGTTAT |
| | | AAGGAGATGAATGCTTTTGATGGTAAGACTATTGATAAGGAGACTGGTGAGGTTCTTCATCAGAAGACTCATTTTCCTCAGCC |
| | | TTGGGAGTTTTTTGCTCAGGAGGTTATGATTCGTGTTTTTGGTAAGCCTGATGGTAAGCCTGAGTTTGAGGAGGCTGATACTC |
| | | TTGAGAAGCTTCGTACTCTTCTTGCTGAGAAGCTTTCTTCTCGTCCTGAGGCTGTTCATGAGTATGTTACTCCTCTTTTTGTT |
| | | TCTCGTGCTCCTAATCGTAAGATGTCTGGTCAGGGTCATATGGAGACTGTTAAGTCTGCTAAGCGTCTTGATGAGGGTGTTTC |
| | | TGTTCTTCGTGTTCCTCTTACTCAGCTTAAGCTTAAGGATCTTGAGAAGATGGTTAATCGTGAGCGTGAGCCTAAGCTTTATG |
| | | AGGCTCTTAAGGCTCGTCTTGAGGCTCATAAGGATGATCCTGCTAAGGCTTTTGCTGAGCCTTTTTATAAGTATGATAAGGCT |
| | | GGTAATCGTACTCAGCAGGTTAAGGCTGTTCGTGTTGAGCAGGTTCAGAAGACTGGTGTTTGGGTTCGTAATCATAATGGTAT |
| | | TGCTGATAATGCTACTATGGTTCGTGTTGATGTTTTTGAGAAGGGTGATAAGTATTATCTTGTTCCTATTTATTCTTGGCAGG |
| | | TTGCTAAGGGTATTCTTCCTGATCGTGCTGTTGTTCAGGGTAAGGATGAGGAGGATTGGCAGCTTATTGATGATTCTTTTAAT |
| | | TTTAAGTTTTCTCTTCATCCTAATGATCTTGTTGAGGTTATTACTAAGAAGGCTCGTATGTTTGGTTATTTTGCTTCTTGTCA |
| | | TCGTGGTACTGGTAATATTAATATTCGTATTCATGATCTTGATCATAAGATTGGTAAGAATGGTATTCTTGAGGGTATTGGTG |
| | | TTAAGACTGCTCTTTCTTTTCAGAAGTATCAGATTGATGAGCTTGGTAAGGAGATTCGTCCTTGTCGTCTTAAGAAGCGTCCT |
| | | CCTGTTCGTUGA |
| Exemplary | 232 | ATGGCCGCCTTCAAGCCCAACTCCATCAACTACATCCTGGGCCTGGCCATCGGCATCGCCTCCGTGGGCTGGGCCATGGTGGA |
| open | | GATCGACGAGGAGGAGAACCCCATCCGGCTGATCGACCTGGGCGTGCGGGTGTTCGAGCGGGCCGAGGTGCCCAAGACCGGCG |
| reading | | ACTCCCTGGCCATGGCCCGGCGGCTGGCCCGGTCCGTGCGGCGGCTGACCCGGCGGCGGGCCCACCGGCTGCTGCGGACCCGG |
| frame for | | CGGCTGCTGAAGCGGGAGGGCGTGCTGCAGGCCGCCAACTTCGACGAGAACGGCCTGATCAAGTCCCTGCCCAACACCCCCTG |
| Nme1Cas9 | | GCAGCTGCGGGCCGCCGCCCTGGACCGGAAGCTGACCCCCCTGGAGTGGTCCGCCGTGCTGCTGCACCTGATCAAGCACCGGG |
| dCas9 | | GCTACCTGTCCCAGCGGAAGAACGAGGGCGAGACCGCCGACAAGGAGCTGGGCGCCCTGCTGAAGGGCGTGGCCGGCAACGCC |
| | | CACGCCCTGCAGACCGGCGACTTCCGGACCCCCGCCGAGCTGGCCCTGAACAAGTTCGAGAAGGAGTCCGGCCACATCCGGAA |
| | | CCAGCGGTCCGACTACTCCCACACCTTCTCCCGGAAGGACCTGCAGGCCGAGCTGATCCTGCTGTTCGAGAAGCAGAAGGAGT |
| | | TCGGCAACCCCCACGTGTCCGGCGGCCTGAAGGAGGGCATCGAGACCCTGCTGATGACCCAGCGGCCCGCCCTGTCCGGCGAC |
| | | GCCGTGCAGAAGATGCTGGGCCACTGCACCTTCGAGCCCGCCGAGCCCAAGGCCGCCAAGAACACCTACACCGCCGAGCGGTT |
| | | CATCTGGCTGACCAAGCTGAACAACCTGCGGATCCTGGAGCAGGGCTCCGAGCGGCCCCTGACCGACACCGAGCGGGCCACCC |
| | | TGATGGACGAGCCCTACCGGAAGTCCAAGCTGACCTACGCCCAGGCCCGGAAGCTGCTGGGCCTGGAGGACACCGCCTTCTTC |
| | | AAGGGCCTGCGGTACGGCAAGGACAACGCCGAGGCCTCCACCCTGATGGAGATGAAGGCCTACCACGCCATCTCCCGGGCCCT |
| | | GGAGAAGGAGGGCCTGAAGGACAAGAAGTCCCCCCTGAACCTGTCCCCCGAGCTGCAGGACGAGATCGGCACCGCCTTCTCCC |
| | | TGTTCAAGACCGACGAGGACATCACCGGCCGGCTGAAGGACCGGATCCAGCCCGAGATCCTGGAGGCCCTGCTGAAGCACATC |
| | | TCCTTCGACAAGTTCGTGCAGATCTCCCTGAAGGCCCTGCGGCGGATCGTGCCCCTGATGGAGCAGGGCAAGCGGTACGACGA |
| | | GGCCTGCGCCGAGATCTACGGCGACCACTACGGCAAGAAGAACACCGAGGAGAAGATCTACCTGCCCCCCATCCCCGCCGACG |
| | | AGATCCGGAACCCCGTGGTGCTGCGGGCCCTGTCCCAGGCCCGGAAGGTGATCAACGGCGTGGTGCGGCGGTACGGCTCCCCC |
| | | GCCCGGATCCACATCGAGACCGCCCGGGAGGTGGGCAAGTCCTTCAAGGACCGGAAGGAGATCGAGAAGCGGCAGGAGGAGAA |
| | | CCGGAAGGACCGGGAGAAGGCCGCCGCCAAGTTCCGGGAGTACTTCCCCAACTTCGTGGGCGAGCCCAAGTCCAAGGACATCC |
| | | TGAAGCTGCGGCTGTACGAGCAGCAGCACGGCAAGTGCCTGTACTCCGGCAAGGAGATCAACCTGGGCCGGCTGAACGAGAAG |
| | | GGCTACGTGGAGATCGACGCCGCCCTGCCCTTCTCCCGGACCTGGGACGACTCCTTCAACAACAAGGTGCTGGTGCTGGGCTC |
| | | CGAGAACCAGAACAAGGGCAACCAGACCCCCTACGAGTACTTCAACGGCAAGGACAACTCCCGGGAGTGGCAGGAGTTCAAGG |
| | | CCCGGGTGGAGACCTCCCGGTTCCCCCGGTCCAAGAAGCAGCGGATCCTGCTGCAGAAGTTCGACGAGGACGGCTTCAAGGAG |
| | | CGGAACCTGAACGACACCCGGTACGTGAACCGGTTCCTGTGCCAGTTCGTGGCCGACCGGATGCGGCTGACCGGCAAGGGCAA |
| | | GAAGCGGGTGTTCGCCTCCAACGGCCAGATCACCAACCTGCTGCGGGGCTTCTGGGGCCTGCGGAAGGTGCGGGCCGAGAACG |
| | | ACCGGCACCACGCCCTGGACGCCGTGGTGGTGGCCTGCTCCACCGTGGCCATGCAGCAGAAGATCACCCGGTTCGTGCGGTAC |
| | | AAGGAGATGAACGCCTTCGACGGCAAGACCATCGACAAGGAGACCGGCGAGGTGCTGCACCAGAAGACCCACTTCCCCCAGCC |
| | | CTGGGAGTTCTTCGCCCAGGAGGTGATGATCCGGGTGTTCGGCAAGCCCGACGGCAAGCCCGAGTTCGAGGAGGCCGACACCC |
| | | TGGAGAAGCTGCGGACCCTGCTGGCCGAGAAGCTGTCCTCCCGGCCCGAGGCCGTGCACGAGTACGTGACCCCCCTGTTCGTG |
| | | TCCCGGGCCCCCAACCGGAAGATGTCCGGCCAGGGCCACATGGAGACCGTGAAGTCCGCCAAGCGGCTGGACGAGGGCGTGTC |
| | | CGTGCTGCGGGTGCCCCTGACCCAGCTGAAGCTGAAGGACCTGGAGAAGATGGTGAACCGGGAGCGGGAGCCCAAGCTGTACG |
| | | AGGCCCTGAAGGCCCGGCTGGAGGCCCACAAGGACGACCCCGCCAAGGCCTTCGCCGAGCCCTTCTACAAGTACGACAAGGCC |
| | | GGCAACCGGACCCAGCAGGTGAAGGCCGTGCGGGTGGAGCAGGTGCAGAAGACCGGCGTGTGGGTGCGGAACCACAACGGCAT |
| | | CGCCGACAACGCCACCATGGTGCGGGTGGACGTGTTCGAGAAGGGCGACAAGTACTACCTGGTGCCCATCTACTCCTGGCAGG |
| | | TGGCCAAGGGCATCCTGCCCGACCGGGCCGTGGTGCAGGGCAAGGACGAGGAGGACTGGCAGCTGATCGACGACTCCTTCAAC |
| | | TTCAAGTTCTCCCTGCACCCCAACGACCTGGTGGAGGTGATCACCAAGAAGGCCCGGATGTTCGGCTACTTCGCCTCCTGCCA |
| | | CCGGGGCACCGGCAACATCAACATCCGGATCCACGACCTGGACCACAAGATCGGCAAGAACGGCATCCTGGAGGGCATCGGCG |
| | | TGAAGACCGCCCTGTCCTTCCAGAAGTACCAGATCGACGAGCTGGGCAAGGAGATCCGGCCCTGCCGGCTGAAGAAGCGGCCC |
| | | CCCGTGCGGUGA |
| Exemplary | 233 | ATGGCAGCATTCAAACCAAACTCAATCAACTACATCCTAGGACTAGCAATCGGAATCGCATCAGTAGGATGAGCAATGGTAGA |
| open | | AATCGACGAAGAAGAAAACCCAATCCGACTAATCGACCTAGGAGTACGAGTATTCGAACGAGCAGAAGTACCAAAAACAGGAG |
| reading | | ACTCACTAGCAATGGCACGACGACTAGCACGATCAGTACGACGACTAACACGACGACGAGCACACCGACTACTACGAACACGA |
| frame for | | CGACTACTAAAACGAGAAGGAGTACTACAAGCAGCAAACTTCGACGAAAACGGACTAATCAAATCACTACCAAACACACCATG |
| Nme1Cas9 | | ACAACTACGAGCAGCAGCACTAGACCGAAAACTAACACCACTAGAATGATCAGCAGTACTACTACACCTAATCAAACACCGAG |
| dCas9 | | GATACCTATCACAACGAAAAAACGAAGGAGAAACAGCAGACAAAGAACTAGGAGCACTACTAAAAGGAGTAGCAGGAAACGCA |
| | | CACGCACTACAAACAGGAGACTTCCGAACACCAGCAGAACTAGCACTAAACAAATTCGAAAAAGAATCAGGACACATCCGAAA |
| | | CCAACGATCAGACTACTCACACACATTCTCACGAAAAGACCTACAAGCAGAACTAATCCTACTATTCGAAAAACAAAAAGAAT |
| | | TCGGAAACCCACACGTATCAGGAGGACTAAAAGAAGGAATCGAAACACTACTAATGACACAACGACCAGCACTATCAGGAGAC |
| | | GCAGTACAAAAAATGCTAGGACACTGCACATTCGAACCAGCAGAACCAAAAGCAGCAAAAAACACATACACAGCAGAACGATT |
| | | CATCTGACTAACAAAACTAAACAACCTACGAATCCTAGAACAAGGATCAGAACGACCACTAACAGACACAGAACGAGCAACAC |
| | | TAATGGACGAACCATACCGAAAATCAAAACTAACATACGCACAAGCACGAAAACTACTAGGACTAGAAGACACAGCATTCTTC |
| | | AAAGGACTACGATACGGAAAAGACAACGCAGAAGCATCAACACTAATGGAAATGAAAGCATACCACGCAATCTCACGAGCACT |
| | | AGAAAAAGAAGGACTAAAAGACAAAAAATCACCACTAAACCTATCACCAGAACTACAAGACGAAATCGGAACAGCATTCTCAC |
| | | TATTCAAAACAGACGAAGACATCACAGGACGACTAAAAGACCGAATCCAACCAGAAATCCTAGAAGCACTACTAAAACACATC |
| | | TCATTCGACAAATTCGTACAAATCTCACTAAAAGCACTACGACGAATCGTACCACTAATGGAACAAGGAAAACGATACGACGA |
| | | AGCATGCGCAGAAATCTACGGAGACCACTACGGAAAAAAAAACACAGAAGAAAAAATCTACCTACCACCAATCCCAGCAGACG |
| | | AAATCCGAAACCCAGTAGTACTACGAGCACTATCACAAGCACGAAAAGTAATCAACGGAGTAGTACGACGATACGGATCACCA |
| | | GCACGAATCCACATCGAAACAGCACGAGAAGTAGGAAAATCATTCAAAGACCGAAAAGAAATCGAAAAACGACAAGAAGAAAA |
| | | CCGAAAAGACCGAGAAAAAGCAGCAGCAAAATTCCGAGAATACTTCCCAAACTTCGTAGGAGAACCAAAATCAAAAGACATCC |
| | | TAAAACTACGACTATACGAACAACAACACGGAAAATGCCTATACTCAGGAAAAGAAATCAACCTAGGACGACTAAACGAAAAA |
| | | GGATACGTAGAAATCGACGCAGCACTACCATTCTCACGAACATGAGACGACTCATTCAACAACAAAGTACTAGTACTAGGATC |
| | | AGAAAACCAAAACAAAGGAAACCAAACACCATACGAATACTTCAACGGAAAAGACAACTCACGAGAATGACAAGAATTCAAAG |
| | | CACGAGTAGAAACATCACGATTCCCACGATCAAAAAAACAACGAATCCTACTACAAAAATTCGACGAAGACGGATTCAAAGAA |
| | | CGAAACCTAAACGACACACGATACGTAAACCGATTCCTATGCCAATTCGTAGCAGACCGAATGCGACTAACAGGAAAAGGAAA |
| | | AAAACGAGTATTCGCATCAAACGGACAAATCACAAACCTACTACGAGGATTCTGAGGACTACGAAAAGTACGAGCAGAAAACG |
| | | ACCGACACCACGCACTAGACGCAGTAGTAGTAGCATGCTCAACAGTAGCAATGCAACAAAAAATCACACGATTCGTACGATAC |
| | | AAAGAAATGAACGCATTCGACGGAAAAACAATCGACAAAGAAACAGGAGAAGTACTACACCAAAAAACACACTTCCCACAACC |
| | | ATGAGAATTCTTCGCACAAGAAGTAATGATCCGAGTATTCGGAAAACCAGACGGAAAACCAGAATTCGAAGAAGCAGACACAC |
| | | TAGAAAAACTACGAACACTACTAGCAGAAAAACTATCATCACGACCAGAAGCAGTACACGAATACGTAACACCACTATTCGTA |
| | | TCACGAGCACCAAACCGAAAAATGTCAGGACAAGGACACATGGAAACAGTAAAATCAGCAAAACGACTAGACGAAGGAGTATC |
| | | AGTACTACGAGTACCACTAACACAACTAAAACTAAAAGACCTAGAAAAAATGGTAAACCGAGAACGAGAACCAAAACTATACG |
| | | AAGCACTAAAAGCACGACTAGAAGCACACAAAGACGACCCAGCAAAAGCATTCGCAGAACCATTCTACAAATACGACAAAGCA |
| | | GGAAACCGAACACAACAAGTAAAAGCAGTACGAGTAGAACAAGTACAAAAAACAGGAGTATGAGTACGAAACCACAACGGAAT |
| | | CGCAGACAACGCAACAATGGTACGAGTAGACGTATTCGAAAAAGGAGACAAATACTACCTAGTACCAATCTACTCATGACAAG |
| | | TAGCAAAAGGAATCCTACCAGACCGAGCAGTAGTACAAGGAAAAGACGAAGAAGACTGACAACTAATCGACGACTCATTCAAC |
| | | TTCAAATTCTCACTACACCCAAACGACCTAGTAGAAGTAATCACAAAAAAAGCACGAATGTTCGGATACTTCGCATCATGCCA |
| | | CCGAGGAACAGGAAACATCAACATCCGAATCCACGACCTAGACCACAAAATCGGAAAAAACGGAATCCTAGAAGGAATCGGAG |
| | | TAAAAACAGCACTATCATTCCAAAAATACCAAATCGACGAACTAGGAAAAGAAATCCGACCATGCCGACTAAAAAAACGACCA |
| | | CCAGTACGAUAA |
| Exemplary | 234 | MAAFKPNSINYILGLAIGIASVGWAMVEIDEEENPIRLIDLGVRVFERAEVPKTGDSLAMARRLARSVRRLTRRRAHRLLRTR |
| amino | | RLLKREGVLQAANFDENGLIKSLPNTPWQLRAAALDRKLTPLEWSAVLLHLIKHRGYLSQRKNEGETADKELGALLKGVAGNA |
| acid | | HALQTGDFRTPAELALNKFEKESGHIRNQRSDYSHTFSRKDLQAELILLFEKQKEFGNPHVSGGLKEGIETLLMTQRPALSGD |
| sequence | | AVQKMLGHCTFEPAEPKAAKNTYTAERFIWLTKLNNLRILEQGSERPLTDTERATLMDEPYRKSKLTYAQARKLLGLEDTAFF |
| of | | KGLRYGKDNAEASTLMEMKAYHAISRALEKEGLKDKKSPLNLSPELQDEIGTAFSLEKTDEDITGRLKDRIQPEILEALLKHI |
| Nme1Cas9 | | SFDKFVQISLKALRRIVPLMEQGKRYDEACAEIYGDHYGKKNTEEKIYLPPIPADEIRNPVVLRALSQARKVINGVVRRYGSP |
| RuvC | | ARIHIETAREVGKSFKDRKEIEKRQEENRKDREKAAAKFREYFPNFVGEPKSKDILKLRLYEQQHGKCLYSGKEINLGRLNEK |
| nickase | | GYVEIDHALPFSRTWDDSFNNKVLVLGSENQNKGNQTPYEYENGKDNSREWQEFKARVETSRFPRSKKQRILLQKEDEDGEKE |
| | | RNLNDTRYVNRFLCQFVADRMRLTGKGKKRVFASNGQITNLLRGFWGLRKVRAENDRHHALDAVVVACSTVAMQQKITRFVRY |
| | | KEMNAFDGKTIDKETGEVLHQKTHFPQPWEFFAQEVMIRVFGKPDGKPEFEEADTLEKLRTLLAEKLSSRPEAVHEYVTPLFV |
| | | SRAPNRKMSGQGHMETVKSAKRLDEGVSVLRVPLTQLKLKDLEKMVNREREPKLYEALKARLEAHKDDPAKAFAEPFYKYDKA |
| | | GNRTQQVKAVRVEQVQKTGVWVRNHNGIADNATMVRVDVFEKGDKYYLVPIYSWQVAKGILPDRAVVQGKDEEDWQLIDDSFN |
| | | FKFSLHPNDLVEVITKKARMEGYFASCHRGTGNINIRIHDLDHKIGKNGILEGIGVKTALSFQKYQIDELGKEIRPCRLKKRP |
| | | PVR |
| Exemplary | 235 | GCTGCTTTTAAGCCTAATTCTATTAATTATATTCTTGGTCTTGCTATTGGTATTGCTTCTGTTGGTTGGGCTATGGTTGAGAT |
| coding | | TGATGAGGAGGAGAATCCTATTCGTCTTATTGATCTTGGTGTTCGTGTTTTTGAGCGTGCTGAGGTTCCTAAGACTGGTGATT |
| sequence | | CTCTTGCTATGGCTCGTCGTCTTGCTCGTTCTGTTCGTCGTCTTACTCGTCGTCGTGCTCATCGTCTTCTTCGTACTCGTCGT |
| encoding | | CTTCTTAAGCGTGAGGGTGTTCTTCAGGCTGCTAATTTTGATGAGAATGGTCTTATTAAGTCTCTTCCTAATACTCCTTGGCA |
| Nme1Cas 9 | | GCTTCGTGCTGCTGCTCTTGATCGTAAGCTTACTCCTCTTGAGTGGTCTGCTGTTCTTCTTCATCTTATTAAGCATCGTGGTT |
| RuvC | | ATCTTTCTCAGCGTAAGAATGAGGGTGAGACTGCTGATAAGGAGCTTGGTGCTCTTCTTAAGGGTGTTGCTGGTAATGCTCAT |
| nickase | | GCTCTTCAGACTGGTGATTTTCGTACTCCTGCTGAGCTTGCTCTTAATAAGTTTGAGAAGGAGTCTGGTCATATTCGTAATCA |
| | | GCGTTCTGATTATTCTCATACTTTTTCTCGTAAGGATCTTCAGGCTGAGCTTATTCTTCTTTTTGAGAAGCAGAAGGAGTTTG |
| | | GTAATCCTCATGTTTCTGGTGGTCTTAAGGAGGGTATTGAGACTCTTCTTATGACTCAGCGTCCTGCTCTTTCTGGTGATGCT |
| | | GTTCAGAAGATGCTTGGTCATTGTACTTTTGAGCCTGCTGAGCCTAAGGCTGCTAAGAATACTTATACTGCTGAGCGTTTTAT |
| | | TTGGCTTACTAAGCTTAATAATCTTCGTATTCTTGAGCAGGGTTCTGAGCGTCCTCTTACTGATACTGAGCGTGCTACTCTTA |
| | | TGGATGAGCCTTATCGTAAGTCTAAGCTTACTTATGCTCAGGCTCGTAAGCTTCTTGGTCTTGAGGATACTGCTTTTTTTAAG |
| | | GGTCTTCGTTATGGTAAGGATAATGCTGAGGCTTCTACTCTTATGGAGATGAAGGCTTATCATGCTATTTCTCGTGCTCTTGA |
| | | GAAGGAGGGTCTTAAGGATAAGAAGTCTCCTCTTAATCTTTCTCCTGAGCTTCAGGATGAGATTGGTACTGCTTTTTCTCTTT |
| | | TTAAGACTGATGAGGATATTACTGGTCGTCTTAAGGATCGTATTCAGCCTGAGATTCTTGAGGCTCTTCTTAAGCATATTTCT |
| | | TTTGATAAGTTTGTTCAGATTTCTCTTAAGGCTCTTCGTCGTATTGTTCCTCTTATGGAGCAGGGTAAGCGTTATGATGAGGC |
| | | TTGTGCTGAGATTTATGGTGATCATTATGGTAAGAAGAATACTGAGGAGAAGATTTATCTTCCTCCTATTCCTGCTGATGAGA |
| | | TTCGTAATCCTGTTGTTCTTCGTGCTCTTTCTCAGGCTCGTAAGGTTATTAATGGTGTTGTTCGTCGTTATGGTTCTCCTGCT |
| | | CGTATTCATATTGAGACTGCTCGTGAGGTTGGTAAGTCTTTTAAGGATCGTAAGGAGATTGAGAAGCGTCAGGAGGAGAATCG |
| | | TAAGGATCGTGAGAAGGCTGCTGCTAAGTTTCGTGAGTATTTTCCTAATTTTGTTGGTGAGCCTAAGTCTAAGGATATTCTTA |
| | | AGCTTCGTCTTTATGAGCAGCAGCATGGTAAGTGTCTTTATTCTGGTAAGGAGATTAATCTTGGTCGTCTTAATGAGAAGGGT |
| | | TATGTTGAGATTGATCATGCTCTTCCTTTTTCTCGTACTTGGGATGATTCTTTTAATAATAAGGTTCTTGTTCTTGGTTCTGA |
| | | GAATCAGAATAAGGGTAATCAGACTCCTTATGAGTATTTTAATGGTAAGGATAATTCTCGTGAGTGGCAGGAGTTTAAGGCTC |
| | | GTGTTGAGACTTCTCGTTTTCCTCGTTCTAAGAAGCAGCGTATTCTTCTTCAGAAGTTTGATGAGGATGGTTTTAAGGAGCGT |
| | | AATCTTAATGATACTCGTTATGTTAATCGTTTTCTTTGTCAGTTTGTTGCTGATCGTATGCGTCTTACTGGTAAGGGTAAGAA |
| | | GCGTGTTTTTGCTTCTAATGGTCAGATTACTAATCTTCTTCGTGGTTTTTGGGGTCTTCGTAAGGTTCGTGCTGAGAATGATC |
| | | GTCATCATGCTCTTGATGCTGTTGTTGTTGCTTGTTCTACTGTTGCTATGCAGCAGAAGATTACTCGTTTTGTTCGTTATAAG |
| | | GAGATGAATGCTTTTGATGGTAAGACTATTGATAAGGAGACTGGTGAGGTTCTTCATCAGAAGACTCATTTTCCTCAGCCTTG |
| | | GGAGTTTTTTGCTCAGGAGGTTATGATTCGTGTTTTTGGTAAGCCTGATGGTAAGCCTGAGTTTGAGGAGGCTGATACTCTTG |
| | | AGAAGCTTCGTACTCTTCTTGCTGAGAAGCTTTCTTCTCGTCCTGAGGCTGTTCATGAGTATGTTACTCCTCTTTTTGTTTCT |
| | | CGTGCTCCTAATCGTAAGATGTCTGGTCAGGGTCATATGGAGACTGTTAAGTCTGCTAAGCGTCTTGATGAGGGTGTTTCTGT |
| | | TCTTCGTGTTCCTCTTACTCAGCTTAAGCTTAAGGATCTTGAGAAGATGGTTAATCGTGAGCGTGAGCCTAAGCTTTATGAGG |
| | | CTCTTAAGGCTCGTCTTGAGGCTCATAAGGATGATCCTGCTAAGGCTTTTGCTGAGCCTTTTTATAAGTATGATAAGGCTGGT |
| | | AATCGTACTCAGCAGGTTAAGGCTGTTCGTGTTGAGCAGGTTCAGAAGACTGGTGTTTGGGTTCGTAATCATAATGGTATTGC |
| | | TGATAATGCTACTATGGTTCGTGTTGATGTTTTTGAGAAGGGTGATAAGTATTATCTTGTTCCTATTTATTCTTGGCAGGTTG |
| | | CTAAGGGTATTCTTCCTGATCGTGCTGTTGTTCAGGGTAAGGATGAGGAGGATTGGCAGCTTATTGATGATTCTTTTAATTTT |
| | | AAGTTTTCTCTTCATCCTAATGATCTTGTTGAGGTTATTACTAAGAAGGCTCGTATGTTTGGTTATTTTGCTTCTTGTCATCG |
| | | TGGTACTGGTAATATTAATATTCGTATTCATGATCTTGATCATAAGATTGGTAAGAATGGTATTCTTGAGGGTATTGGTGTTA |
| | | AGACTGCTCTTTCTTTTCAGAAGTATCAGATTGATGAGCTTGGTAAGGAGATTCGTCCTTGTCGTCTTAAGAAGCGTCCTCCT |
| | | GTTCGT |
| Exemplary | 236 | GCCGCCTTCAAGCCCAACTCCATCAACTACATCCTGGGCCTGGCCATCGGCATCGCCTCCGTGGGCTGGGCCATGGTGGAGAT |
| coding | | CGACGAGGAGGAGAACCCCATCCGGCTGATCGACCTGGGCGTGCGGGTGTTCGAGCGGGCCGAGGTGCCCAAGACCGGCGACT |
| sequence | | CCCTGGCCATGGCCCGGCGGCTGGCCCGGTCCGTGCGGCGGCTGACCCGGCGGCGGGCCCACCGGCTGCTGCGGACCCGGCGG |
| encoding | | CTGCTGAAGCGGGAGGGCGTGCTGCAGGCCGCCAACTTCGACGAGAACGGCCTGATCAAGTCCCTGCCCAACACCCCCTGGCA |
| Nme1Cas9 | | GCTGCGGGCCGCCGCCCTGGACCGGAAGCTGACCCCCCTGGAGTGGTCCGCCGTGCTGCTGCACCTGATCAAGCACCGGGGCT |
| Ruvc | | ACCTGTCCCAGCGGAAGAACGAGGGCGAGACCGCCGACAAGGAGCTGGGCGCCCTGCTGAAGGGCGTGGCCGGCAACGCCCAC |
| nickase | | GCCCTGCAGACCGGCGACTTCCGGACCCCCGCCGAGCTGGCCCTGAACAAGTTCGAGAAGGAGTCCGGCCACATCCGGAACCA |
| | | GCGGTCCGACTACTCCCACACCTTCTCCCGGAAGGACCTGCAGGCCGAGCTGATCCTGCTGTTCGAGAAGCAGAAGGAGTTCG |
| | | GCAACCCCCACGTGTCCGGCGGCCTGAAGGAGGGCATCGAGACCCTGCTGATGACCCAGCGGCCCGCCCTGTCCGGCGACGCC |
| | | GTGCAGAAGATGCTGGGCCACTGCACCTTCGAGCCCGCCGAGCCCAAGGCCGCCAAGAACACCTACACCGCCGAGCGGTTCAT |
| | | CTGGCTGACCAAGCTGAACAACCTGCGGATCCTGGAGCAGGGCTCCGAGCGGCCCCTGACCGACACCGAGCGGGCCACCCTGA |
| | | TGGACGAGCCCTACCGGAAGTCCAAGCTGACCTACGCCCAGGCCCGGAAGCTGCTGGGCCTGGAGGACACCGCCTTCTTCAAG |
| | | GGCCTGCGGTACGGCAAGGACAACGCCGAGGCCTCCACCCTGATGGAGATGAAGGCCTACCACGCCATCTCCCGGGCCCTGGA |
| | | GAAGGAGGGCCTGAAGGACAAGAAGTCCCCCCTGAACCTGTCCCCCGAGCTGCAGGACGAGATCGGCACCGCCTTCTCCCTGT |
| | | TCAAGACCGACGAGGACATCACCGGCCGGCTGAAGGACCGGATCCAGCCCGAGATCCTGGAGGCCCTGCTGAAGCACATCTCC |
| | | TTCGACAAGTTCGTGCAGATCTCCCTGAAGGCCCTGCGGCGGATCGTGCCCCTGATGGAGCAGGGCAAGCGGTACGACGAGGC |
| | | CTGCGCCGAGATCTACGGCGACCACTACGGCAAGAAGAACACCGAGGAGAAGATCTACCTGCCCCCCATCCCCGCCGACGAGA |
| | | TCCGGAACCCCGTGGTGCTGCGGGCCCTGTCCCAGGCCCGGAAGGTGATCAACGGCGTGGTGCGGCGGTACGGCTCCCCCGCC |
| | | CGGATCCACATCGAGACCGCCCGGGAGGTGGGCAAGTCCTTCAAGGACCGGAAGGAGATCGAGAAGCGGCAGGAGGAGAACCG |
| | | GAAGGACCGGGAGAAGGCCGCCGCCAAGTTCCGGGAGTACTTCCCCAACTTCGTGGGCGAGCCCAAGTCCAAGGACATCCTGA |
| | | AGCTGCGGCTGTACGAGCAGCAGCACGGCAAGTGCCTGTACTCCGGCAAGGAGATCAACCTGGGCCGGCTGAACGAGAAGGGC |
| | | TACGTGGAGATCGACCACGCCCTGCCCTTCTCCCGGACCTGGGACGACTCCTTCAACAACAAGGTGCTGGTGCTGGGCTCCGA |
| | | GAACCAGAACAAGGGCAACCAGACCCCCTACGAGTACTTCAACGGCAAGGACAACTCCCGGGAGTGGCAGGAGTTCAAGGCCC |
| | | GGGTGGAGACCTCCCGGTTCCCCCGGTCCAAGAAGCAGCGGATCCTGCTGCAGAAGTTCGACGAGGACGGCTTCAAGGAGCGG |
| | | AACCTGAACGACACCCGGTACGTGAACCGGTTCCTGTGCCAGTTCGTGGCCGACCGGATGCGGCTGACCGGCAAGGGCAAGAA |
| | | GCGGGTGTTCGCCTCCAACGGCCAGATCACCAACCTGCTGCGGGGCTTCTGGGGCCTGCGGAAGGTGCGGGCCGAGAACGACC |
| | | GGCACCACGCCCTGGACGCCGTGGTGGTGGCCTGCTCCACCGTGGCCATGCAGCAGAAGATCACCCGGTTCGTGCGGTACAAG |
| | | GAGATGAACGCCTTCGACGGCAAGACCATCGACAAGGAGACCGGCGAGGTGCTGCACCAGAAGACCCACTTCCCCCAGCCCTG |
| | | GGAGTTCTTCGCCCAGGAGGTGATGATCCGGGTGTTCGGCAAGCCCGACGGCAAGCCCGAGTTCGAGGAGGCCGACACCCTGG |
| | | AGAAGCTGCGGACCCTGCTGGCCGAGAAGCTGTCCTCCCGGCCCGAGGCCGTGCACGAGTACGTGACCCCCCTGTTCGTGTCC |
| | | CGGGCCCCCAACCGGAAGATGTCCGGCCAGGGCCACATGGAGACCGTGAAGTCCGCCAAGCGGCTGGACGAGGGCGTGTCCGT |
| | | GCTGCGGGTGCCCCTGACCCAGCTGAAGCTGAAGGACCTGGAGAAGATGGTGAACCGGGAGCGGGAGCCCAAGCTGTACGAGG |
| | | CCCTGAAGGCCCGGCTGGAGGCCCACAAGGACGACCCCGCCAAGGCCTTCGCCGAGCCCTTCTACAAGTACGACAAGGCCGGC |
| | | AACCGGACCCAGCAGGTGAAGGCCGTGCGGGTGGAGCAGGTGCAGAAGACCGGCGTGTGGGTGCGGAACCACAACGGCATCGC |
| | | CGACAACGCCACCATGGTGCGGGTGGACGTGTTCGAGAAGGGCGACAAGTACTACCTGGTGCCCATCTACTCCTGGCAGGTGG |
| | | CCAAGGGCATCCTGCCCGACCGGGCCGTGGTGCAGGGCAAGGACGAGGAGGACTGGCAGCTGATCGACGACTCCTTCAACTTC |
| | | AAGTTCTCCCTGCACCCCAACGACCTGGTGGAGGTGATCACCAAGAAGGCCCGGATGTTCGGCTACTTCGCCTCCTGCCACCG |
| | | GGGCACCGGCAACATCAACATCCGGATCCACGACCTGGACCACAAGATCGGCAAGAACGGCATCCTGGAGGGCATCGGCGTGA |
| | | AGACCGCCCTGTCCTTCCAGAAGTACCAGATCGACGAGCTGGGCAAGGAGATCCGGCCCTGCCGGCTGAAGAAGCGGCCCCCC |
| | | GTGCGG |
| Exemplary | 237 | GCAGCATTCAAACCAAACTCAATCAACTACATCCTAGGACTAGCAATCGGAATCGCATCAGTAGGATGAGCAATGGTAGAAAT |
| coding | | CGACGAAGAAGAAAACCCAATCCGACTAATCGACCTAGGAGTACGAGTATTCGAACGAGCAGAAGTACCAAAAACAGGAGACT |
| sequence | | CACTAGCAATGGCACGACGACTAGCACGATCAGTACGACGACTAACACGACGACGAGCACACCGACTACTACGAACACGACGA |
| encoding | | CTACTAAAACGAGAAGGAGTACTACAAGCAGCAAACTTCGACGAAAACGGACTAATCAAATCACTACCAAACACACCATGACA |
| Nme1Cas9 | | ACTACGAGCAGCAGCACTAGACCGAAAACTAACACCACTAGAATGATCAGCAGTACTACTACACCTAATCAAACACCGAGGAT |
| RuvC | | ACCTATCACAACGAAAAAACGAAGGAGAAACAGCAGACAAAGAACTAGGAGCACTACTAAAAGGAGTAGCAGGAAACGCACAC |
| nickase | | GCACTACAAACAGGAGACTTCCGAACACCAGCAGAACTAGCACTAAACAAATTCGAAAAAGAATCAGGACACATCCGAAACCA |
| | | ACGATCAGACTACTCACACACATTCTCACGAAAAGACCTACAAGCAGAACTAATCCTACTATTCGAAAAACAAAAAGAATTCG |
| | | GAAACCCACACGTATCAGGAGGACTAAAAGAAGGAATCGAAACACTACTAATGACACAACGACCAGCACTATCAGGAGACGCA |
| | | GTACAAAAAATGCTAGGACACTGCACATTCGAACCAGCAGAACCAAAAGCAGCAAAAAACACATACACAGCAGAACGATTCAT |
| | | CTGACTAACAAAACTAAACAACCTACGAATCCTAGAACAAGGATCAGAACGACCACTAACAGACACAGAACGAGCAACACTAA |
| | | TGGACGAACCATACCGAAAATCAAAACTAACATACGCACAAGCACGAAAACTACTAGGACTAGAAGACACAGCATTCTTCAAA |
| | | GGACTACGATACGGAAAAGACAACGCAGAAGCATCAACACTAATGGAAATGAAAGCATACCACGCAATCTCACGAGCACTAGA |
| | | AAAAGAAGGACTAAAAGACAAAAAATCACCACTAAACCTATCACCAGAACTACAAGACGAAATCGGAACAGCATTCTCACTAT |
| | | TCAAAACAGACGAAGACATCACAGGACGACTAAAAGACCGAATCCAACCAGAAATCCTAGAAGCACTACTAAAACACATCTCA |
| | | TTCGACAAATTCGTACAAATCTCACTAAAAGCACTACGACGAATCGTACCACTAATGGAACAAGGAAAACGATACGACGAAGC |
| | | ATGCGCAGAAATCTACGGAGACCACTACGGAAAAAAAAACACAGAAGAAAAAATCTACCTACCACCAATCCCAGCAGACGAAA |
| | | TCCGAAACCCAGTAGTACTACGAGCACTATCACAAGCACGAAAAGTAATCAACGGAGTAGTACGACGATACGGATCACCAGCA |
| | | CGAATCCACATCGAAACAGCACGAGAAGTAGGAAAATCATTCAAAGACCGAAAAGAAATCGAAAAACGACAAGAAGAAAACCG |
| | | AAAAGACCGAGAAAAAGCAGCAGCAAAATTCCGAGAATACTTCCCAAACTTCGTAGGAGAACCAAAATCAAAAGACATCCTAA |
| | | AACTACGACTATACGAACAACAACACGGAAAATGCCTATACTCAGGAAAAGAAATCAACCTAGGACGACTAAACGAAAAAGGA |
| | | TACGTAGAAATCGACCACGCACTACCATTCTCACGAACATGAGACGACTCATTCAACAACAAAGTACTAGTACTAGGATCAGA |
| | | AAACCAAAACAAAGGAAACCAAACACCATACGAATACTTCAACGGAAAAGACAACTCACGAGAATGACAAGAATTCAAAGCAC |
| | | GAGTAGAAACATCACGATTCCCACGATCAAAAAAACAACGAATCCTACTACAAAAATTCGACGAAGACGGATTCAAAGAACGA |
| | | AACCTAAACGACACACGATACGTAAACCGATTCCTATGCCAATTCGTAGCAGACCGAATGCGACTAACAGGAAAAGGAAAAAA |
| | | ACGAGTATTCGCATCAAACGGACAAATCACAAACCTACTACGAGGATTCTGAGGACTACGAAAAGTACGAGCAGAAAACGACC |
| | | GACACCACGCACTAGACGCAGTAGTAGTAGCATGCTCAACAGTAGCAATGCAACAAAAAATCACACGATTCGTACGATACAAA |
| | | GAAATGAACGCATTCGACGGAAAAACAATCGACAAAGAAACAGGAGAAGTACTACACCAAAAAACACACTTCCCACAACCATG |
| | | AGAATTCTTCGCACAAGAAGTAATGATCCGAGTATTCGGAAAACCAGACGGAAAACCAGAATTCGAAGAAGCAGACACACTAG |
| | | AAAAACTACGAACACTACTAGCAGAAAAACTATCATCACGACCAGAAGCAGTACACGAATACGTAACACCACTATTCGTATCA |
| | | CGAGCACCAAACCGAAAAATGTCAGGACAAGGACACATGGAAACAGTAAAATCAGCAAAACGACTAGACGAAGGAGTATCAGT |
| | | ACTACGAGTACCACTAACACAACTAAAACTAAAAGACCTAGAAAAAATGGTAAACCGAGAACGAGAACCAAAACTATACGAAG |
| | | CACTAAAAGCACGACTAGAAGCACACAAAGACGACCCAGCAAAAGCATTCGCAGAACCATTCTACAAATACGACAAAGCAGGA |
| | | AACCGAACACAACAAGTAAAAGCAGTACGAGTAGAACAAGTACAAAAAACAGGAGTATGAGTACGAAACCACAACGGAATCGC |
| | | AGACAACGCAACAATGGTACGAGTAGACGTATTCGAAAAAGGAGACAAATACTACCTAGTACCAATCTACTCATGACAAGTAG |
| | | CAAAAGGAATCCTACCAGACCGAGCAGTAGTACAAGGAAAAGACGAAGAAGACTGACAACTAATCGACGACTCATTCAACTTC |
| | | AAATTCTCACTACACCCAAACGACCTAGTAGAAGTAATCACAAAAAAAGCACGAATGTTCGGATACTTCGCATCATGCCACCG |
| | | AGGAACAGGAAACATCAACATCCGAATCCACGACCTAGACCACAAAATCGGAAAAAACGGAATCCTAGAAGGAATCGGAGTAA |
| | | AAACAGCACTATCATTCCAAAAATACCAAATCGACGAACTAGGAAAAGAAATCCGACCATGCCGACTAAAAAAACGACCACCA |
| | | GTACGA |
| Exemplary | 238 | ATGGCTGCTTTTAAGCCTAATTCTATTAATTATATTCTTGGTCTTGCTATTGGTATTGCTTCTGTTGGTTGGGCTATGGTTGA |
| open | | GATTGATGAGGAGGAGAATCCTATTCGTCTTATTGATCTTGGTGTTCGTGTTTTTGAGCGTGCTGAGGTTCCTAAGACTGGTG |
| reading | | ATTCTCTTGCTATGGCTCGTCGTCTTGCTCGTTCTGTTCGTCGTCTTACTCGTCGTCGTGCTCATCGTCTTCTTCGTACTCGT |
| frame for | | CGTCTTCTTAAGCGTGAGGGTGTTCTTCAGGCTGCTAATTTTGATGAGAATGGTCTTATTAAGTCTCTTCCTAATACTCCTTG |
| Nme1Cas 9 | | GCAGCTTCGTGCTGCTGCTCTTGATCGTAAGCTTACTCCTCTTGAGTGGTCTGCTGTTCTTCTTCATCTTATTAAGCATCGTG |
| RuvC | | GTTATCTTTCTCAGCGTAAGAATGAGGGTGAGACTGCTGATAAGGAGCTTGGTGCTCTTCTTAAGGGTGTTGCTGGTAATGCT |
| nickase | | CATGCTCTTCAGACTGGTGATTTTCGTACTCCTGCTGAGCTTGCTCTTAATAAGTTTGAGAAGGAGTCTGGTCATATTCGTAA |
| | | TCAGCGTTCTGATTATTCTCATACTTTTTCTCGTAAGGATCTTCAGGCTGAGCTTATTCTTCTTTTTGAGAAGCAGAAGGAGT |
| | | TTGGTAATCCTCATGTTTCTGGTGGTCTTAAGGAGGGTATTGAGACTCTTCTTATGACTCAGCGTCCTGCTCTTTCTGGTGAT |
| | | GCTGTTCAGAAGATGCTTGGTCATTGTACTTTTGAGCCTGCTGAGCCTAAGGCTGCTAAGAATACTTATACTGCTGAGCGTTT |
| | | TATTTGGCTTACTAAGCTTAATAATCTTCGTATTCTTGAGCAGGGTTCTGAGCGTCCTCTTACTGATACTGAGCGTGCTACTC |
| | | TTATGGATGAGCCTTATCGTAAGTCTAAGCTTACTTATGCTCAGGCTCGTAAGCTTCTTGGTCTTGAGGATACTGCTTTTTTT |
| | | AAGGGTCTTCGTTATGGTAAGGATAATGCTGAGGCTTCTACTCTTATGGAGATGAAGGCTTATCATGCTATTTCTCGTGCTCT |
| | | TGAGAAGGAGGGTCTTAAGGATAAGAAGTCTCCTCTTAATCTTTCTCCTGAGCTTCAGGATGAGATTGGTACTGCTTTTTCTC |
| | | TTTTTAAGACTGATGAGGATATTACTGGTCGTCTTAAGGATCGTATTCAGCCTGAGATTCTTGAGGCTCTTCTTAAGCATATT |
| | | TCTTTTGATAAGTTTGTTCAGATTTCTCTTAAGGCTCTTCGTCGTATTGTTCCTCTTATGGAGCAGGGTAAGCGTTATGATGA |
| | | GGCTTGTGCTGAGATTTATGGTGATCATTATGGTAAGAAGAATACTGAGGAGAAGATTTATCTTCCTCCTATTCCTGCTGATG |
| | | AGATTCGTAATCCTGTTGTTCTTCGTGCTCTTTCTCAGGCTCGTAAGGTTATTAATGGTGTTGTTCGTCGTTATGGTTCTCCT |
| | | GCTCGTATTCATATTGAGACTGCTCGTGAGGTTGGTAAGTCTTTTAAGGATCGTAAGGAGATTGAGAAGCGTCAGGAGGAGAA |
| | | TCGTAAGGATCGTGAGAAGGCTGCTGCTAAGTTTCGTGAGTATTTTCCTAATTTTGTTGGTGAGCCTAAGTCTAAGGATATTC |
| | | TTAAGCTTCGTCTTTATGAGCAGCAGCATGGTAAGTGTCTTTATTCTGGTAAGGAGATTAATCTTGGTCGTCTTAATGAGAAG |
| | | GGTTATGTTGAGATTGATCATGCTCTTCCTTTTTCTCGTACTTGGGATGATTCTTTTAATAATAAGGTTCTTGTTCTTGGTTC |
| | | TGAGAATCAGAATAAGGGTAATCAGACTCCTTATGAGTATTTTAATGGTAAGGATAATTCTCGTGAGTGGCAGGAGTTTAAGG |
| | | CTCGTGTTGAGACTTCTCGTTTTCCTCGTTCTAAGAAGCAGCGTATTCTTCTTCAGAAGTTTGATGAGGATGGTTTTAAGGAG |
| | | CGTAATCTTAATGATACTCGTTATGTTAATCGTTTTCTTTGTCAGTTTGTTGCTGATCGTATGCGTCTTACTGGTAAGGGTAA |
| | | GAAGCGTGTTTTTGCTTCTAATGGTCAGATTACTAATCTTCTTCGTGGTTTTTGGGGTCTTCGTAAGGTTCGTGCTGAGAATG |
| | | ATCGTCATCATGCTCTTGATGCTGTTGTTGTTGCTTGTTCTACTGTTGCTATGCAGCAGAAGATTACTCGTTTTGTTCGTTAT |
| | | AAGGAGATGAATGCTTTTGATGGTAAGACTATTGATAAGGAGACTGGTGAGGTTCTTCATCAGAAGACTCATTTTCCTCAGCC |
| | | TTGGGAGTTTTTTGCTCAGGAGGTTATGATTCGTGTTTTTGGTAAGCCTGATGGTAAGCCTGAGTTTGAGGAGGCTGATACTC |
| | | TTGAGAAGCTTCGTACTCTTCTTGCTGAGAAGCTTTCTTCTCGTCCTGAGGCTGTTCATGAGTATGTTACTCCTCTTTTTGTT |
| | | TCTCGTGCTCCTAATCGTAAGATGTCTGGTCAGGGTCATATGGAGACTGTTAAGTCTGCTAAGCGTCTTGATGAGGGTGTTTC |
| | | TGTTCTTCGTGTTCCTCTTACTCAGCTTAAGCTTAAGGATCTTGAGAAGATGGTTAATCGTGAGCGTGAGCCTAAGCTTTATG |
| | | AGGCTCTTAAGGCTCGTCTTGAGGCTCATAAGGATGATCCTGCTAAGGCTTTTGCTGAGCCTTTTTATAAGTATGATAAGGCT |
| | | GGTAATCGTACTCAGCAGGTTAAGGCTGTTCGTGTTGAGCAGGTTCAGAAGACTGGTGTTTGGGTTCGTAATCATAATGGTAT |
| | | TGCTGATAATGCTACTATGGTTCGTGTTGATGTTTTTGAGAAGGGTGATAAGTATTATCTTGTTCCTATTTATTCTTGGCAGG |
| | | TTGCTAAGGGTATTCTTCCTGATCGTGCTGTTGTTCAGGGTAAGGATGAGGAGGATTGGCAGCTTATTGATGATTCTTTTAAT |
| | | TTTAAGTTTTCTCTTCATCCTAATGATCTTGTTGAGGTTATTACTAAGAAGGCTCGTATGTTTGGTTATTTTGCTTCTTGTCA |
| | | TCGTGGTACTGGTAATATTAATATTCGTATTCATGATCTTGATCATAAGATTGGTAAGAATGGTATTCTTGAGGGTATTGGTG |
| | | TTAAGACTGCTCTTTCTTTTCAGAAGTATCAGATTGATGAGCTTGGTAAGGAGATTCGTCCTTGTCGTCTTAAGAAGCGTCCT |
| | | CCTGTTCGTUGA |
| Exemplary | 239 | ATGGCCGCCTTCAAGCCCAACTCCATCAACTACATCCTGGGCCTGGCCATCGGCATCGCCTCCGTGGGCTGGGCCATGGTGGA |
| open | | GATCGACGAGGAGGAGAACCCCATCCGGCTGATCGACCTGGGCGTGCGGGTGTTCGAGCGGGCCGAGGTGCCCAAGACCGGCG |
| reading | | ACTCCCTGGCCATGGCCCGGCGGCTGGCCCGGTCCGTGCGGCGGCTGACCCGGCGGCGGGCCCACCGGCTGCTGCGGACCCGG |
| frame for | | CGGCTGCTGAAGCGGGAGGGCGTGCTGCAGGCCGCCAACTTCGACGAGAACGGCCTGATCAAGTCCCTGCCCAACACCCCCTG |
| Nme1Cas 9 | | GCAGCTGCGGGCCGCCGCCCTGGACCGGAAGCTGACCCCCCTGGAGTGGTCCGCCGTGCTGCTGCACCTGATCAAGCACCGGG |
| Ruvc | | GCTACCTGTCCCAGCGGAAGAACGAGGGCGAGACCGCCGACAAGGAGCTGGGCGCCCTGCTGAAGGGCGTGGCCGGCAACGCC |
| nickase | | CACGCCCTGCAGACCGGCGACTTCCGGACCCCCGCCGAGCTGGCCCTGAACAAGTTCGAGAAGGAGTCCGGCCACATCCGGAA |
| | | CCAGCGGTCCGACTACTCCCACACCTTCTCCCGGAAGGACCTGCAGGCCGAGCTGATCCTGCTGTTCGAGAAGCAGAAGGAGT |
| | | TCGGCAACCCCCACGTGTCCGGCGGCCTGAAGGAGGGCATCGAGACCCTGCTGATGACCCAGCGGCCCGCCCTGTCCGGCGAC |
| | | GCCGTGCAGAAGATGCTGGGCCACTGCACCTTCGAGCCCGCCGAGCCCAAGGCCGCCAAGAACACCTACACCGCCGAGCGGTT |
| | | CATCTGGCTGACCAAGCTGAACAACCTGCGGATCCTGGAGCAGGGCTCCGAGCGGCCCCTGACCGACACCGAGCGGGCCACCC |
| | | TGATGGACGAGCCCTACCGGAAGTCCAAGCTGACCTACGCCCAGGCCCGGAAGCTGCTGGGCCTGGAGGACACCGCCTTCTTC |
| | | AAGGGCCTGCGGTACGGCAAGGACAACGCCGAGGCCTCCACCCTGATGGAGATGAAGGCCTACCACGCCATCTCCCGGGCCCT |
| | | GGAGAAGGAGGGCCTGAAGGACAAGAAGTCCCCCCTGAACCTGTCCCCCGAGCTGCAGGACGAGATCGGCACCGCCTTCTCCC |
| | | TGTTCAAGACCGACGAGGACATCACCGGCCGGCTGAAGGACCGGATCCAGCCCGAGATCCTGGAGGCCCTGCTGAAGCACATC |
| | | TCCTTCGACAAGTTCGTGCAGATCTCCCTGAAGGCCCTGCGGCGGATCGTGCCCCTGATGGAGCAGGGCAAGCGGTACGACGA |
| | | GGCCTGCGCCGAGATCTACGGCGACCACTACGGCAAGAAGAACACCGAGGAGAAGATCTACCTGCCCCCCATCCCCGCCGACG |
| | | AGATCCGGAACCCCGTGGTGCTGCGGGCCCTGTCCCAGGCCCGGAAGGTGATCAACGGCGTGGTGCGGCGGTACGGCTCCCCC |
| | | GCCCGGATCCACATCGAGACCGCCCGGGAGGTGGGCAAGTCCTTCAAGGACCGGAAGGAGATCGAGAAGCGGCAGGAGGAGAA |
| | | CCGGAAGGACCGGGAGAAGGCCGCCGCCAAGTTCCGGGAGTACTTCCCCAACTTCGTGGGCGAGCCCAAGTCCAAGGACATCC |
| | | TGAAGCTGCGGCTGTACGAGCAGCAGCACGGCAAGTGCCTGTACTCCGGCAAGGAGATCAACCTGGGCCGGCTGAACGAGAAG |
| | | GGCTACGTGGAGATCGACCACGCCCTGCCCTTCTCCCGGACCTGGGACGACTCCTTCAACAACAAGGTGCTGGTGCTGGGCTC |
| | | CGAGAACCAGAACAAGGGCAACCAGACCCCCTACGAGTACTTCAACGGCAAGGACAACTCCCGGGAGTGGCAGGAGTTCAAGG |
| | | CCCGGGTGGAGACCTCCCGGTTCCCCCGGTCCAAGAAGCAGCGGATCCTGCTGCAGAAGTTCGACGAGGACGGCTTCAAGGAG |
| | | CGGAACCTGAACGACACCCGGTACGTGAACCGGTTCCTGTGCCAGTTCGTGGCCGACCGGATGCGGCTGACCGGCAAGGGCAA |
| | | GAAGCGGGTGTTCGCCTCCAACGGCCAGATCACCAACCTGCTGCGGGGCTTCTGGGGCCTGCGGAAGGTGCGGGCCGAGAACG |
| | | ACCGGCACCACGCCCTGGACGCCGTGGTGGTGGCCTGCTCCACCGTGGCCATGCAGCAGAAGATCACCCGGTTCGTGCGGTAC |
| | | AAGGAGATGAACGCCTTCGACGGCAAGACCATCGACAAGGAGACCGGCGAGGTGCTGCACCAGAAGACCCACTTCCCCCAGCC |
| | | CTGGGAGTTCTTCGCCCAGGAGGTGATGATCCGGGTGTTCGGCAAGCCCGACGGCAAGCCCGAGTTCGAGGAGGCCGACACCC |
| | | TGGAGAAGCTGCGGACCCTGCTGGCCGAGAAGCTGTCCTCCCGGCCCGAGGCCGTGCACGAGTACGTGACCCCCCTGTTCGTG |
| | | TCCCGGGCCCCCAACCGGAAGATGTCCGGCCAGGGCCACATGGAGACCGTGAAGTCCGCCAAGCGGCTGGACGAGGGCGTGTC |
| | | CGTGCTGCGGGTGCCCCTGACCCAGCTGAAGCTGAAGGACCTGGAGAAGATGGTGAACCGGGAGCGGGAGCCCAAGCTGTACG |
| | | AGGCCCTGAAGGCCCGGCTGGAGGCCCACAAGGACGACCCCGCCAAGGCCTTCGCCGAGCCCTTCTACAAGTACGACAAGGCC |
| | | GGCAACCGGACCCAGCAGGTGAAGGCCGTGCGGGTGGAGCAGGTGCAGAAGACCGGCGTGTGGGTGCGGAACCACAACGGCAT |
| | | CGCCGACAACGCCACCATGGTGCGGGTGGACGTGTTCGAGAAGGGCGACAAGTACTACCTGGTGCCCATCTACTCCTGGCAGG |
| | | TGGCCAAGGGCATCCTGCCCGACCGGGCCGTGGTGCAGGGCAAGGACGAGGAGGACTGGCAGCTGATCGACGACTCCTTCAAC |
| | | TTCAAGTTCTCCCTGCACCCCAACGACCTGGTGGAGGTGATCACCAAGAAGGCCCGGATGTTCGGCTACTTCGCCTCCTGCCA |
| | | CCGGGGCACCGGCAACATCAACATCCGGATCCACGACCTGGACCACAAGATCGGCAAGAACGGCATCCTGGAGGGCATCGGCG |
| | | TGAAGACCGCCCTGTCCTTCCAGAAGTACCAGATCGACGAGCTGGGCAAGGAGATCCGGCCCTGCCGGCTGAAGAAGCGGCCC |
| | | CCCGTGCGGUGA |
| Exemplary | 240 | ATGGCAGCATTCAAACCAAACTCAATCAACTACATCCTAGGACTAGCAATCGGAATCGCATCAGTAGGATGAGCAATGGTAGA |
| open | | AATCGACGAAGAAGAAAACCCAATCCGACTAATCGACCTAGGAGTACGAGTATTCGAACGAGCAGAAGTACCAAAAACAGGAG |
| reading | | ACTCACTAGCAATGGCACGACGACTAGCACGATCAGTACGACGACTAACACGACGACGAGCACACCGACTACTACGAACACGA |
| frame for | | CGACTACTAAAACGAGAAGGAGTACTACAAGCAGCAAACTTCGACGAAAACGGACTAATCAAATCACTACCAAACACACCATG |
| Nme1Cas9 | | ACAACTACGAGCAGCAGCACTAGACCGAAAACTAACACCACTAGAATGATCAGCAGTACTACTACACCTAATCAAACACCGAG |
| RuvC | | GATACCTATCACAACGAAAAAACGAAGGAGAAACAGCAGACAAAGAACTAGGAGCACTACTAAAAGGAGTAGCAGGAAACGCA |
| nickase | | CACGCACTACAAACAGGAGACTTCCGAACACCAGCAGAACTAGCACTAAACAAATTCGAAAAAGAATCAGGACACATCCGAAA |
| | | CCAACGATCAGACTACTCACACACATTCTCACGAAAAGACCTACAAGCAGAACTAATCCTACTATTCGAAAAACAAAAAGAAT |
| | | TCGGAAACCCACACGTATCAGGAGGACTAAAAGAAGGAATCGAAACACTACTAATGACACAACGACCAGCACTATCAGGAGAC |
| | | GCAGTACAAAAAATGCTAGGACACTGCACATTCGAACCAGCAGAACCAAAAGCAGCAAAAAACACATACACAGCAGAACGATT |
| | | CATCTGACTAACAAAACTAAACAACCTACGAATCCTAGAACAAGGATCAGAACGACCACTAACAGACACAGAACGAGCAACAC |
| | | TAATGGACGAACCATACCGAAAATCAAAACTAACATACGCACAAGCACGAAAACTACTAGGACTAGAAGACACAGCATTCTTC |
| | | AAAGGACTACGATACGGAAAAGACAACGCAGAAGCATCAACACTAATGGAAATGAAAGCATACCACGCAATCTCACGAGCACT |
| | | AGAAAAAGAAGGACTAAAAGACAAAAAATCACCACTAAACCTATCACCAGAACTACAAGACGAAATCGGAACAGCATTCTCAC |
| | | TATTCAAAACAGACGAAGACATCACAGGACGACTAAAAGACCGAATCCAACCAGAAATCCTAGAAGCACTACTAAAACACATC |
| | | TCATTCGACAAATTCGTACAAATCTCACTAAAAGCACTACGACGAATCGTACCACTAATGGAACAAGGAAAACGATACGACGA |
| | | AGCATGCGCAGAAATCTACGGAGACCACTACGGAAAAAAAAACACAGAAGAAAAAATCTACCTACCACCAATCCCAGCAGACG |
| | | AAATCCGAAACCCAGTAGTACTACGAGCACTATCACAAGCACGAAAAGTAATCAACGGAGTAGTACGACGATACGGATCACCA |
| | | GCACGAATCCACATCGAAACAGCACGAGAAGTAGGAAAATCATTCAAAGACCGAAAAGAAATCGAAAAACGACAAGAAGAAAA |
| | | CCGAAAAGACCGAGAAAAAGCAGCAGCAAAATTCCGAGAATACTTCCCAAACTTCGTAGGAGAACCAAAATCAAAAGACATCC |
| | | TAAAACTACGACTATACGAACAACAACACGGAAAATGCCTATACTCAGGAAAAGAAATCAACCTAGGACGACTAAACGAAAAA |
| | | GGATACGTAGAAATCGACCACGCACTACCATTCTCACGAACATGAGACGACTCATTCAACAACAAAGTACTAGTACTAGGATC |
| | | AGAAAACCAAAACAAAGGAAACCAAACACCATACGAATACTTCAACGGAAAAGACAACTCACGAGAATGACAAGAATTCAAAG |
| | | CACGAGTAGAAACATCACGATTCCCACGATCAAAAAAACAACGAATCCTACTACAAAAATTCGACGAAGACGGATTCAAAGAA |
| | | CGAAACCTAAACGACACACGATACGTAAACCGATTCCTATGCCAATTCGTAGCAGACCGAATGCGACTAACAGGAAAAGGAAA |
| | | AAAACGAGTATTCGCATCAAACGGACAAATCACAAACCTACTACGAGGATTCTGAGGACTACGAAAAGTACGAGCAGAAAACG |
| | | ACCGACACCACGCACTAGACGCAGTAGTAGTAGCATGCTCAACAGTAGCAATGCAACAAAAAATCACACGATTCGTACGATAC |
| | | AAAGAAATGAACGCATTCGACGGAAAAACAATCGACAAAGAAACAGGAGAAGTACTACACCAAAAAACACACTTCCCACAACC |
| | | ATGAGAATTCTTCGCACAAGAAGTAATGATCCGAGTATTCGGAAAACCAGACGGAAAACCAGAATTCGAAGAAGCAGACACAC |
| | | TAGAAAAACTACGAACACTACTAGCAGAAAAACTATCATCACGACCAGAAGCAGTACACGAATACGTAACACCACTATTCGTA |
| | | TCACGAGCACCAAACCGAAAAATGTCAGGACAAGGACACATGGAAACAGTAAAATCAGCAAAACGACTAGACGAAGGAGTATC |
| | | AGTACTACGAGTACCACTAACACAACTAAAACTAAAAGACCTAGAAAAAATGGTAAACCGAGAACGAGAACCAAAACTATACG |
| | | AAGCACTAAAAGCACGACTAGAAGCACACAAAGACGACCCAGCAAAAGCATTCGCAGAACCATTCTACAAATACGACAAAGCA |
| | | GGAAACCGAACACAACAAGTAAAAGCAGTACGAGTAGAACAAGTACAAAAAACAGGAGTATGAGTACGAAACCACAACGGAAT |
| | | CGCAGACAACGCAACAATGGTACGAGTAGACGTATTCGAAAAAGGAGACAAATACTACCTAGTACCAATCTACTCATGACAAG |
| | | TAGCAAAAGGAATCCTACCAGACCGAGCAGTAGTACAAGGAAAAGACGAAGAAGACTGACAACTAATCGACGACTCATTCAAC |
| | | TTCAAATTCTCACTACACCCAAACGACCTAGTAGAAGTAATCACAAAAAAAGCACGAATGTTCGGATACTTCGCATCATGCCA |
| | | CCGAGGAACAGGAAACATCAACATCCGAATCCACGACCTAGACCACAAAATCGGAAAAAACGGAATCCTAGAAGGAATCGGAG |
| | | TAAAAACAGCACTATCATTCCAAAAATACCAAATCGACGAACTAGGAAAAGAAATCCGACCATGCCGACTAAAAAAACGACCA |
| | | CCAGTACGAUAA |
| Exemplary | 241 | MAAFKPNSINYILGLDIGIASVGWAMVEIDEEENPIRLIDLGVRVFERAEVPKTGDSLAMARRLARSVRRLTRRRAHRLLRTR |
| amino | | RLLKREGVLQAANEDENGLIKSLPNTPWQLRAAALDRKLTPLEWSAVLLHLIKHRGYLSQRKNEGETADKELGALLKGVAGNA |
| acid | | HALQTGDFRTPAELALNKFEKESGHIRNQRSDYSHTFSRKDLQAELILLFEKQKEFGNPHVSGGLKEGIETLLMTQRPALSGD |
| sequence | | AVQKMLGHCTFEPAEPKAAKNTYTAERFIWLTKLNNLRILEQGSERPLTDTERATLMDEPYRKSKLTYAQARKLLGLEDTAFF |
| of | | KGLRYGKDNAEASTLMEMKAYHAISRALEKEGLKDKKSPLNLSPELQDEIGTAFSLEKTDEDITGRLKDRIQPEILEALLKHI |
| Nme1Cas9 | | SFDKFVQISLKALRRIVPLMEQGKRYDEACAEIYGDHYGKKNTEEKIYLPPIPADEIRNPVVLRALSQARKVINGVVRRYGSP |
| HNH | | ARIHIETAREVGKSFKDRKEIEKRQEENRKDREKAAAKFREYFPNFVGEPKSKDILKLRLYEQQHGKCLYSGKEINLGRLNEK |
| nickase | | GYVEIDAALPFSRTWDDSFNNKVLVLGSENQNKGNQTPYEYENGKDNSREWQEFKARVETSRFPRSKKQRILLQKEDEDGEKE |
| | | RNLNDTRYVNRFLCQFVADRMRLTGKGKKRVFASNGQITNLLRGFWGLRKVRAENDRHHALDAVVVACSTVAMQQKITRFVRY |
| | | KEMNAFDGKTIDKETGEVLHQKTHFPQPWEFFAQEVMIRVFGKPDGKPEFEEADTLEKLRTLLAEKLSSRPEAVHEYVTPLFV |
| | | SRAPNRKMSGQGHMETVKSAKRLDEGVSVLRVPLTQLKLKDLEKMVNREREPKLYEALKARLEAHKDDPAKAFAEPFYKYDKA |
| | | GNRTQQVKAVRVEQVQKTGVWVRNHNGIADNATMVRVDVFEKGDKYYLVPIYSWQVAKGILPDRAVVQGKDEEDWQLIDDSFN |
| | | FKFSLHPNDLVEVITKKARMFGYFASCHRGTGNINIRIHDLDHKIGKNGILEGIGVKTALSFQKYQIDELGKEIRPCRLKKRP |
| | | PVR |
| Exemplary | 242 | GCTGCTTTTAAGCCTAATTCTATTAATTATATTCTTGGTCTTGATATTGGTATTGCTTCTGTTGGTTGGGCTATGGTTGAGAT |
| coding | | TGATGAGGAGGAGAATCCTATTCGTCTTATTGATCTTGGTGTTCGTGTTTTTGAGCGTGCTGAGGTTCCTAAGACTGGTGATT |
| sequence | | CTCTTGCTATGGCTCGTCGTCTTGCTCGTTCTGTTCGTCGTCTTACTCGTCGTCGTGCTCATCGTCTTCTTCGTACTCGTCGT |
| encoding | | CTTCTTAAGCGTGAGGGTGTTCTTCAGGCTGCTAATTTTGATGAGAATGGTCTTATTAAGTCTCTTCCTAATACTCCTTGGCA |
| Nme1Cas9 | | GCTTCGTGCTGCTGCTCTTGATCGTAAGCTTACTCCTCTTGAGTGGTCTGCTGTTCTTCTTCATCTTATTAAGCATCGTGGTT |
| HNH | | ATCTTTCTCAGCGTAAGAATGAGGGTGAGACTGCTGATAAGGAGCTTGGTGCTCTTCTTAAGGGTGTTGCTGGTAATGCTCAT |
| nickase | | GCTCTTCAGACTGGTGATTTTCGTACTCCTGCTGAGCTTGCTCTTAATAAGTTTGAGAAGGAGTCTGGTCATATTCGTAATCA |
| | | GCGTTCTGATTATTCTCATACTTTTTCTCGTAAGGATCTTCAGGCTGAGCTTATTCTTCTTTTTGAGAAGCAGAAGGAGTTTG |
| | | GTAATCCTCATGTTTCTGGTGGTCTTAAGGAGGGTATTGAGACTCTTCTTATGACTCAGCGTCCTGCTCTTTCTGGTGATGCT |
| | | GTTCAGAAGATGCTTGGTCATTGTACTTTTGAGCCTGCTGAGCCTAAGGCTGCTAAGAATACTTATACTGCTGAGCGTTTTAT |
| | | TTGGCTTACTAAGCTTAATAATCTTCGTATTCTTGAGCAGGGTTCTGAGCGTCCTCTTACTGATACTGAGCGTGCTACTCTTA |
| | | TGGATGAGCCTTATCGTAAGTCTAAGCTTACTTATGCTCAGGCTCGTAAGCTTCTTGGTCTTGAGGATACTGCTTTTTTTAAG |
| | | GGTCTTCGTTATGGTAAGGATAATGCTGAGGCTTCTACTCTTATGGAGATGAAGGCTTATCATGCTATTTCTCGTGCTCTTGA |
| | | GAAGGAGGGTCTTAAGGATAAGAAGTCTCCTCTTAATCTTTCTCCTGAGCTTCAGGATGAGATTGGTACTGCTTTTTCTCTTT |
| | | TTAAGACTGATGAGGATATTACTGGTCGTCTTAAGGATCGTATTCAGCCTGAGATTCTTGAGGCTCTTCTTAAGCATATTTCT |
| | | TTTGATAAGTTTGTTCAGATTTCTCTTAAGGCTCTTCGTCGTATTGTTCCTCTTATGGAGCAGGGTAAGCGTTATGATGAGGC |
| | | TTGTGCTGAGATTTATGGTGATCATTATGGTAAGAAGAATACTGAGGAGAAGATTTATCTTCCTCCTATTCCTGCTGATGAGA |
| | | TTCGTAATCCTGTTGTTCTTCGTGCTCTTTCTCAGGCTCGTAAGGTTATTAATGGTGTTGTTCGTCGTTATGGTTCTCCTGCT |
| | | CGTATTCATATTGAGACTGCTCGTGAGGTTGGTAAGTCTTTTAAGGATCGTAAGGAGATTGAGAAGCGTCAGGAGGAGAATCG |
| | | TAAGGATCGTGAGAAGGCTGCTGCTAAGTTTCGTGAGTATTTTCCTAATTTTGTTGGTGAGCCTAAGTCTAAGGATATTCTTA |
| | | AGCTTCGTCTTTATGAGCAGCAGCATGGTAAGTGTCTTTATTCTGGTAAGGAGATTAATCTTGGTCGTCTTAATGAGAAGGGT |
| | | TATGTTGAGATTGATGCTGCTCTTCCTTTTTCTCGTACTTGGGATGATTCTTTTAATAATAAGGTTCTTGTTCTTGGTTCTGA |
| | | GAATCAGAATAAGGGTAATCAGACTCCTTATGAGTATTTTAATGGTAAGGATAATTCTCGTGAGTGGCAGGAGTTTAAGGCTC |
| | | GTGTTGAGACTTCTCGTTTTCCTCGTTCTAAGAAGCAGCGTATTCTTCTTCAGAAGTTTGATGAGGATGGTTTTAAGGAGCGT |
| | | AATCTTAATGATACTCGTTATGTTAATCGTTTTCTTTGTCAGTTTGTTGCTGATCGTATGCGTCTTACTGGTAAGGGTAAGAA |
| | | GCGTGTTTTTGCTTCTAATGGTCAGATTACTAATCTTCTTCGTGGTTTTTGGGGTCTTCGTAAGGTTCGTGCTGAGAATGATC |
| | | GTCATCATGCTCTTGATGCTGTTGTTGTTGCTTGTTCTACTGTTGCTATGCAGCAGAAGATTACTCGTTTTGTTCGTTATAAG |
| | | GAGATGAATGCTTTTGATGGTAAGACTATTGATAAGGAGACTGGTGAGGTTCTTCATCAGAAGACTCATTTTCCTCAGCCTTG |
| | | GGAGTTTTTTGCTCAGGAGGTTATGATTCGTGTTTTTGGTAAGCCTGATGGTAAGCCTGAGTTTGAGGAGGCTGATACTCTTG |
| | | AGAAGCTTCGTACTCTTCTTGCTGAGAAGCTTTCTTCTCGTCCTGAGGCTGTTCATGAGTATGTTACTCCTCTTTTTGTTTCT |
| | | CGTGCTCCTAATCGTAAGATGTCTGGTCAGGGTCATATGGAGACTGTTAAGTCTGCTAAGCGTCTTGATGAGGGTGTTTCTGT |
| | | TCTTCGTGTTCCTCTTACTCAGCTTAAGCTTAAGGATCTTGAGAAGATGGTTAATCGTGAGCGTGAGCCTAAGCTTTATGAGG |
| | | CTCTTAAGGCTCGTCTTGAGGCTCATAAGGATGATCCTGCTAAGGCTTTTGCTGAGCCTTTTTATAAGTATGATAAGGCTGGT |
| | | AATCGTACTCAGCAGGTTAAGGCTGTTCGTGTTGAGCAGGTTCAGAAGACTGGTGTTTGGGTTCGTAATCATAATGGTATTGC |
| | | TGATAATGCTACTATGGTTCGTGTTGATGTTTTTGAGAAGGGTGATAAGTATTATCTTGTTCCTATTTATTCTTGGCAGGTTG |
| | | CTAAGGGTATTCTTCCTGATCGTGCTGTTGTTCAGGGTAAGGATGAGGAGGATTGGCAGCTTATTGATGATTCTTTTAATTTT |
| | | AAGTTTTCTCTTCATCCTAATGATCTTGTTGAGGTTATTACTAAGAAGGCTCGTATGTTTGGTTATTTTGCTTCTTGTCATCG |
| | | TGGTACTGGTAATATTAATATTCGTATTCATGATCTTGATCATAAGATTGGTAAGAATGGTATTCTTGAGGGTATTGGTGTTA |
| | | AGACTGCTCTTTCTTTTCAGAAGTATCAGATTGATGAGCTTGGTAAGGAGATTCGTCCTTGTCGTCTTAAGAAGCGTCCTCCT |
| | | GTTCGT |
| Exemplary | 243 | GCCGCCTTCAAGCCCAACTCCATCAACTACATCCTGGGCCTGGACATCGGCATCGCCTCCGTGGGCTGGGCCATGGTGGAGAT |
| coding | | CGACGAGGAGGAGAACCCCATCCGGCTGATCGACCTGGGCGTGCGGGTGTTCGAGCGGGCCGAGGTGCCCAAGACCGGCGACT |
| sequence | | CCCTGGCCATGGCCCGGCGGCTGGCCCGGTCCGTGCGGCGGCTGACCCGGCGGCGGGCCCACCGGCTGCTGCGGACCCGGCGG |
| encoding | | CTGCTGAAGCGGGAGGGCGTGCTGCAGGCCGCCAACTTCGACGAGAACGGCCTGATCAAGTCCCTGCCCAACACCCCCTGGCA |
| Nme1Cas9 | | GCTGCGGGCCGCCGCCCTGGACCGGAAGCTGACCCCCCTGGAGTGGTCCGCCGTGCTGCTGCACCTGATCAAGCACCGGGGCT |
| HNH | | ACCTGTCCCAGCGGAAGAACGAGGGCGAGACCGCCGACAAGGAGCTGGGCGCCCTGCTGAAGGGCGTGGCCGGCAACGCCCAC |
| nickase | | GCCCTGCAGACCGGCGACTTCCGGACCCCCGCCGAGCTGGCCCTGAACAAGTTCGAGAAGGAGTCCGGCCACATCCGGAACCA |
| | | GCGGTCCGACTACTCCCACACCTTCTCCCGGAAGGACCTGCAGGCCGAGCTGATCCTGCTGTTCGAGAAGCAGAAGGAGTTCG |
| | | GCAACCCCCACGTGTCCGGCGGCCTGAAGGAGGGCATCGAGACCCTGCTGATGACCCAGCGGCCCGCCCTGTCCGGCGACGCC |
| | | GTGCAGAAGATGCTGGGCCACTGCACCTTCGAGCCCGCCGAGCCCAAGGCCGCCAAGAACACCTACACCGCCGAGCGGTTCAT |
| | | CTGGCTGACCAAGCTGAACAACCTGCGGATCCTGGAGCAGGGCTCCGAGCGGCCCCTGACCGACACCGAGCGGGCCACCCTGA |
| | | TGGACGAGCCCTACCGGAAGTCCAAGCTGACCTACGCCCAGGCCCGGAAGCTGCTGGGCCTGGAGGACACCGCCTTCTTCAAG |
| | | GGCCTGCGGTACGGCAAGGACAACGCCGAGGCCTCCACCCTGATGGAGATGAAGGCCTACCACGCCATCTCCCGGGCCCTGGA |
| | | GAAGGAGGGCCTGAAGGACAAGAAGTCCCCCCTGAACCTGTCCCCCGAGCTGCAGGACGAGATCGGCACCGCCTTCTCCCTGT |
| | | TCAAGACCGACGAGGACATCACCGGCCGGCTGAAGGACCGGATCCAGCCCGAGATCCTGGAGGCCCTGCTGAAGCACATCTCC |
| | | TTCGACAAGTTCGTGCAGATCTCCCTGAAGGCCCTGCGGCGGATCGTGCCCCTGATGGAGCAGGGCAAGCGGTACGACGAGGC |
| | | CTGCGCCGAGATCTACGGCGACCACTACGGCAAGAAGAACACCGAGGAGAAGATCTACCTGCCCCCCATCCCCGCCGACGAGA |
| | | TCCGGAACCCCGTGGTGCTGCGGGCCCTGTCCCAGGCCCGGAAGGTGATCAACGGCGTGGTGCGGCGGTACGGCTCCCCCGCC |
| | | CGGATCCACATCGAGACCGCCCGGGAGGTGGGCAAGTCCTTCAAGGACCGGAAGGAGATCGAGAAGCGGCAGGAGGAGAACCG |
| | | GAAGGACCGGGAGAAGGCCGCCGCCAAGTTCCGGGAGTACTTCCCCAACTTCGTGGGCGAGCCCAAGTCCAAGGACATCCTGA |
| | | AGCTGCGGCTGTACGAGCAGCAGCACGGCAAGTGCCTGTACTCCGGCAAGGAGATCAACCTGGGCCGGCTGAACGAGAAGGGC |
| | | TACGTGGAGATCGACGCCGCCCTGCCCTTCTCCCGGACCTGGGACGACTCCTTCAACAACAAGGTGCTGGTGCTGGGCTCCGA |
| | | GAACCAGAACAAGGGCAACCAGACCCCCTACGAGTACTTCAACGGCAAGGACAACTCCCGGGAGTGGCAGGAGTTCAAGGCCC |
| | | GGGTGGAGACCTCCCGGTTCCCCCGGTCCAAGAAGCAGCGGATCCTGCTGCAGAAGTTCGACGAGGACGGCTTCAAGGAGCGG |
| | | AACCTGAACGACACCCGGTACGTGAACCGGTTCCTGTGCCAGTTCGTGGCCGACCGGATGCGGCTGACCGGCAAGGGCAAGAA |
| | | GCGGGTGTTCGCCTCCAACGGCCAGATCACCAACCTGCTGCGGGGCTTCTGGGGCCTGCGGAAGGTGCGGGCCGAGAACGACC |
| | | GGCACCACGCCCTGGACGCCGTGGTGGTGGCCTGCTCCACCGTGGCCATGCAGCAGAAGATCACCCGGTTCGTGCGGTACAAG |
| | | GAGATGAACGCCTTCGACGGCAAGACCATCGACAAGGAGACCGGCGAGGTGCTGCACCAGAAGACCCACTTCCCCCAGCCCTG |
| | | GGAGTTCTTCGCCCAGGAGGTGATGATCCGGGTGTTCGGCAAGCCCGACGGCAAGCCCGAGTTCGAGGAGGCCGACACCCTGG |
| | | AGAAGCTGCGGACCCTGCTGGCCGAGAAGCTGTCCTCCCGGCCCGAGGCCGTGCACGAGTACGTGACCCCCCTGTTCGTGTCC |
| | | CGGGCCCCCAACCGGAAGATGTCCGGCCAGGGCCACATGGAGACCGTGAAGTCCGCCAAGCGGCTGGACGAGGGCGTGTCCGT |
| | | GCTGCGGGTGCCCCTGACCCAGCTGAAGCTGAAGGACCTGGAGAAGATGGTGAACCGGGAGCGGGAGCCCAAGCTGTACGAGG |
| | | CCCTGAAGGCCCGGCTGGAGGCCCACAAGGACGACCCCGCCAAGGCCTTCGCCGAGCCCTTCTACAAGTACGACAAGGCCGGC |
| | | AACCGGACCCAGCAGGTGAAGGCCGTGCGGGTGGAGCAGGTGCAGAAGACCGGCGTGTGGGTGCGGAACCACAACGGCATCGC |
| | | CGACAACGCCACCATGGTGCGGGTGGACGTGTTCGAGAAGGGCGACAAGTACTACCTGGTGCCCATCTACTCCTGGCAGGTGG |
| | | CCAAGGGCATCCTGCCCGACCGGGCCGTGGTGCAGGGCAAGGACGAGGAGGACTGGCAGCTGATCGACGACTCCTTCAACTTC |
| | | AAGTTCTCCCTGCACCCCAACGACCTGGTGGAGGTGATCACCAAGAAGGCCCGGATGTTCGGCTACTTCGCCTCCTGCCACCG |
| | | GGGCACCGGCAACATCAACATCCGGATCCACGACCTGGACCACAAGATCGGCAAGAACGGCATCCTGGAGGGCATCGGCGTGA |
| | | AGACCGCCCTGTCCTTCCAGAAGTACCAGATCGACGAGCTGGGCAAGGAGATCCGGCCCTGCCGGCTGAAGAAGCGGCCCCCC |
| | | GTGCGG |
| Exemplary | 244 | GCAGCATTCAAACCAAACTCAATCAACTACATCCTAGGACTAGACATCGGAATCGCATCAGTAGGATGAGCAATGGTAGAAAT |
| coding | | CGACGAAGAAGAAAACCCAATCCGACTAATCGACCTAGGAGTACGAGTATTCGAACGAGCAGAAGTACCAAAAACAGGAGACT |
| sequence | | CACTAGCAATGGCACGACGACTAGCACGATCAGTACGACGACTAACACGACGACGAGCACACCGACTACTACGAACACGACGA |
| encoding | | CTACTAAAACGAGAAGGAGTACTACAAGCAGCAAACTTCGACGAAAACGGACTAATCAAATCACTACCAAACACACCATGACA |
| Nme1Cas9 | | ACTACGAGCAGCAGCACTAGACCGAAAACTAACACCACTAGAATGATCAGCAGTACTACTACACCTAATCAAACACCGAGGAT |
| HNH | | ACCTATCACAACGAAAAAACGAAGGAGAAACAGCAGACAAAGAACTAGGAGCACTACTAAAAGGAGTAGCAGGAAACGCACAC |
| nickase | | GCACTACAAACAGGAGACTTCCGAACACCAGCAGAACTAGCACTAAACAAATTCGAAAAAGAATCAGGACACATCCGAAACCA |
| | | ACGATCAGACTACTCACACACATTCTCACGAAAAGACCTACAAGCAGAACTAATCCTACTATTCGAAAAACAAAAAGAATTCG |
| | | GAAACCCACACGTATCAGGAGGACTAAAAGAAGGAATCGAAACACTACTAATGACACAACGACCAGCACTATCAGGAGACGCA |
| | | GTACAAAAAATGCTAGGACACTGCACATTCGAACCAGCAGAACCAAAAGCAGCAAAAAACACATACACAGCAGAACGATTCAT |
| | | CTGACTAACAAAACTAAACAACCTACGAATCCTAGAACAAGGATCAGAACGACCACTAACAGACACAGAACGAGCAACACTAA |
| | | TGGACGAACCATACCGAAAATCAAAACTAACATACGCACAAGCACGAAAACTACTAGGACTAGAAGACACAGCATTCTTCAAA |
| | | GGACTACGATACGGAAAAGACAACGCAGAAGCATCAACACTAATGGAAATGAAAGCATACCACGCAATCTCACGAGCACTAGA |
| | | AAAAGAAGGACTAAAAGACAAAAAATCACCACTAAACCTATCACCAGAACTACAAGACGAAATCGGAACAGCATTCTCACTAT |
| | | TCAAAACAGACGAAGACATCACAGGACGACTAAAAGACCGAATCCAACCAGAAATCCTAGAAGCACTACTAAAACACATCTCA |
| | | TTCGACAAATTCGTACAAATCTCACTAAAAGCACTACGACGAATCGTACCACTAATGGAACAAGGAAAACGATACGACGAAGC |
| | | ATGCGCAGAAATCTACGGAGACCACTACGGAAAAAAAAACACAGAAGAAAAAATCTACCTACCACCAATCCCAGCAGACGAAA |
| | | TCCGAAACCCAGTAGTACTACGAGCACTATCACAAGCACGAAAAGTAATCAACGGAGTAGTACGACGATACGGATCACCAGCA |
| | | CGAATCCACATCGAAACAGCACGAGAAGTAGGAAAATCATTCAAAGACCGAAAAGAAATCGAAAAACGACAAGAAGAAAACCG |
| | | AAAAGACCGAGAAAAAGCAGCAGCAAAATTCCGAGAATACTTCCCAAACTTCGTAGGAGAACCAAAATCAAAAGACATCCTAA |
| | | AACTACGACTATACGAACAACAACACGGAAAATGCCTATACTCAGGAAAAGAAATCAACCTAGGACGACTAAACGAAAAAGGA |
| | | TACGTAGAAATCGACGCAGCACTACCATTCTCACGAACATGAGACGACTCATTCAACAACAAAGTACTAGTACTAGGATCAGA |
| | | AAACCAAAACAAAGGAAACCAAACACCATACGAATACTTCAACGGAAAAGACAACTCACGAGAATGACAAGAATTCAAAGCAC |
| | | GAGTAGAAACATCACGATTCCCACGATCAAAAAAACAACGAATCCTACTACAAAAATTCGACGAAGACGGATTCAAAGAACGA |
| | | AACCTAAACGACACACGATACGTAAACCGATTCCTATGCCAATTCGTAGCAGACCGAATGCGACTAACAGGAAAAGGAAAAAA |
| | | ACGAGTATTCGCATCAAACGGACAAATCACAAACCTACTACGAGGATTCTGAGGACTACGAAAAGTACGAGCAGAAAACGACC |
| | | GACACCACGCACTAGACGCAGTAGTAGTAGCATGCTCAACAGTAGCAATGCAACAAAAAATCACACGATTCGTACGATACAAA |
| | | GAAATGAACGCATTCGACGGAAAAACAATCGACAAAGAAACAGGAGAAGTACTACACCAAAAAACACACTTCCCACAACCATG |
| | | AGAATTCTTCGCACAAGAAGTAATGATCCGAGTATTCGGAAAACCAGACGGAAAACCAGAATTCGAAGAAGCAGACACACTAG |
| | | AAAAACTACGAACACTACTAGCAGAAAAACTATCATCACGACCAGAAGCAGTACACGAATACGTAACACCACTATTCGTATCA |
| | | CGAGCACCAAACCGAAAAATGTCAGGACAAGGACACATGGAAACAGTAAAATCAGCAAAACGACTAGACGAAGGAGTATCAGT |
| | | ACTACGAGTACCACTAACACAACTAAAACTAAAAGACCTAGAAAAAATGGTAAACCGAGAACGAGAACCAAAACTATACGAAG |
| | | CACTAAAAGCACGACTAGAAGCACACAAAGACGACCCAGCAAAAGCATTCGCAGAACCATTCTACAAATACGACAAAGCAGGA |
| | | AACCGAACACAACAAGTAAAAGCAGTACGAGTAGAACAAGTACAAAAAACAGGAGTATGAGTACGAAACCACAACGGAATCGC |
| | | AGACAACGCAACAATGGTACGAGTAGACGTATTCGAAAAAGGAGACAAATACTACCTAGTACCAATCTACTCATGACAAGTAG |
| | | CAAAAGGAATCCTACCAGACCGAGCAGTAGTACAAGGAAAAGACGAAGAAGACTGACAACTAATCGACGACTCATTCAACTTC |
| | | AAATTCTCACTACACCCAAACGACCTAGTAGAAGTAATCACAAAAAAAGCACGAATGTTCGGATACTTCGCATCATGCCACCG |
| | | AGGAACAGGAAACATCAACATCCGAATCCACGACCTAGACCACAAAATCGGAAAAAACGGAATCCTAGAAGGAATCGGAGTAA |
| | | AAACAGCACTATCATTCCAAAAATACCAAATCGACGAACTAGGAAAAGAAATCCGACCATGCCGACTAAAAAAACGACCACCA |
| | | GTACGA |
| Exemplary | 245 | ATGGCTGCTTTTAAGCCTAATTCTATTAATTATATTCTTGGTCTTGATATTGGTATTGCTTCTGTTGGTTGGGCTATGGTTGA |
| open | | GATTGATGAGGAGGAGAATCCTATTCGTCTTATTGATCTTGGTGTTCGTGTTTTTGAGCGTGCTGAGGTTCCTAAGACTGGTG |
| reading | | ATTCTCTTGCTATGGCTCGTCGTCTTGCTCGTTCTGTTCGTCGTCTTACTCGTCGTCGTGCTCATCGTCTTCTTCGTACTCGT |
| frame for | | CGTCTTCTTAAGCGTGAGGGTGTTCTTCAGGCTGCTAATTTTGATGAGAATGGTCTTATTAAGTCTCTTCCTAATACTCCTTG |
| Nme1Cas9 | | GCAGCTTCGTGCTGCTGCTCTTGATCGTAAGCTTACTCCTCTTGAGTGGTCTGCTGTTCTTCTTCATCTTATTAAGCATCGTG |
| HNH | | GTTATCTTTCTCAGCGTAAGAATGAGGGTGAGACTGCTGATAAGGAGCTTGGTGCTCTTCTTAAGGGTGTTGCTGGTAATGCT |
| nickase | | CATGCTCTTCAGACTGGTGATTTTCGTACTCCTGCTGAGCTTGCTCTTAATAAGTTTGAGAAGGAGTCTGGTCATATTCGTAA |
| | | TCAGCGTTCTGATTATTCTCATACTTTTTCTCGTAAGGATCTTCAGGCTGAGCTTATTCTTCTTTTTGAGAAGCAGAAGGAGT |
| | | TTGGTAATCCTCATGTTTCTGGTGGTCTTAAGGAGGGTATTGAGACTCTTCTTATGACTCAGCGTCCTGCTCTTTCTGGTGAT |
| | | GCTGTTCAGAAGATGCTTGGTCATTGTACTTTTGAGCCTGCTGAGCCTAAGGCTGCTAAGAATACTTATACTGCTGAGCGTTT |
| | | TATTTGGCTTACTAAGCTTAATAATCTTCGTATTCTTGAGCAGGGTTCTGAGCGTCCTCTTACTGATACTGAGCGTGCTACTC |
| | | TTATGGATGAGCCTTATCGTAAGTCTAAGCTTACTTATGCTCAGGCTCGTAAGCTTCTTGGTCTTGAGGATACTGCTTTTTTT |
| | | AAGGGTCTTCGTTATGGTAAGGATAATGCTGAGGCTTCTACTCTTATGGAGATGAAGGCTTATCATGCTATTTCTCGTGCTCT |
| | | TGAGAAGGAGGGTCTTAAGGATAAGAAGTCTCCTCTTAATCTTTCTCCTGAGCTTCAGGATGAGATTGGTACTGCTTTTTCTC |
| | | TTTTTAAGACTGATGAGGATATTACTGGTCGTCTTAAGGATCGTATTCAGCCTGAGATTCTTGAGGCTCTTCTTAAGCATATT |
| | | TCTTTTGATAAGTTTGTTCAGATTTCTCTTAAGGCTCTTCGTCGTATTGTTCCTCTTATGGAGCAGGGTAAGCGTTATGATGA |
| | | GGCTTGTGCTGAGATTTATGGTGATCATTATGGTAAGAAGAATACTGAGGAGAAGATTTATCTTCCTCCTATTCCTGCTGATG |
| | | AGATTCGTAATCCTGTTGTTCTTCGTGCTCTTTCTCAGGCTCGTAAGGTTATTAATGGTGTTGTTCGTCGTTATGGTTCTCCT |
| | | GCTCGTATTCATATTGAGACTGCTCGTGAGGTTGGTAAGTCTTTTAAGGATCGTAAGGAGATTGAGAAGCGTCAGGAGGAGAA |
| | | TCGTAAGGATCGTGAGAAGGCTGCTGCTAAGTTTCGTGAGTATTTTCCTAATTTTGTTGGTGAGCCTAAGTCTAAGGATATTC |
| | | TTAAGCTTCGTCTTTATGAGCAGCAGCATGGTAAGTGTCTTTATTCTGGTAAGGAGATTAATCTTGGTCGTCTTAATGAGAAG |
| | | GGTTATGTTGAGATTGATGCTGCTCTTCCTTTTTCTCGTACTTGGGATGATTCTTTTAATAATAAGGTTCTTGTTCTTGGTTC |
| | | TGAGAATCAGAATAAGGGTAATCAGACTCCTTATGAGTATTTTAATGGTAAGGATAATTCTCGTGAGTGGCAGGAGTTTAAGG |
| | | CTCGTGTTGAGACTTCTCGTTTTCCTCGTTCTAAGAAGCAGCGTATTCTTCTTCAGAAGTTTGATGAGGATGGTTTTAAGGAG |
| | | CGTAATCTTAATGATACTCGTTATGTTAATCGTTTTCTTTGTCAGTTTGTTGCTGATCGTATGCGTCTTACTGGTAAGGGTAA |
| | | GAAGCGTGTTTTTGCTTCTAATGGTCAGATTACTAATCTTCTTCGTGGTTTTTGGGGTCTTCGTAAGGTTCGTGCTGAGAATG |
| | | ATCGTCATCATGCTCTTGATGCTGTTGTTGTTGCTTGTTCTACTGTTGCTATGCAGCAGAAGATTACTCGTTTTGTTCGTTAT |
| | | AAGGAGATGAATGCTTTTGATGGTAAGACTATTGATAAGGAGACTGGTGAGGTTCTTCATCAGAAGACTCATTTTCCTCAGCC |
| | | TTGGGAGTTTTTTGCTCAGGAGGTTATGATTCGTGTTTTTGGTAAGCCTGATGGTAAGCCTGAGTTTGAGGAGGCTGATACTC |
| | | TTGAGAAGCTTCGTACTCTTCTTGCTGAGAAGCTTTCTTCTCGTCCTGAGGCTGTTCATGAGTATGTTACTCCTCTTTTTGTT |
| | | TCTCGTGCTCCTAATCGTAAGATGTCTGGTCAGGGTCATATGGAGACTGTTAAGTCTGCTAAGCGTCTTGATGAGGGTGTTTC |
| | | TGTTCTTCGTGTTCCTCTTACTCAGCTTAAGCTTAAGGATCTTGAGAAGATGGTTAATCGTGAGCGTGAGCCTAAGCTTTATG |
| | | AGGCTCTTAAGGCTCGTCTTGAGGCTCATAAGGATGATCCTGCTAAGGCTTTTGCTGAGCCTTTTTATAAGTATGATAAGGCT |
| | | GGTAATCGTACTCAGCAGGTTAAGGCTGTTCGTGTTGAGCAGGTTCAGAAGACTGGTGTTTGGGTTCGTAATCATAATGGTAT |
| | | TGCTGATAATGCTACTATGGTTCGTGTTGATGTTTTTGAGAAGGGTGATAAGTATTATCTTGTTCCTATTTATTCTTGGCAGG |
| | | TTGCTAAGGGTATTCTTCCTGATCGTGCTGTTGTTCAGGGTAAGGATGAGGAGGATTGGCAGCTTATTGATGATTCTTTTAAT |
| | | TTTAAGTTTTCTCTTCATCCTAATGATCTTGTTGAGGTTATTACTAAGAAGGCTCGTATGTTTGGTTATTTTGCTTCTTGTCA |
| | | TCGTGGTACTGGTAATATTAATATTCGTATTCATGATCTTGATCATAAGATTGGTAAGAATGGTATTCTTGAGGGTATTGGTG |
| | | TTAAGACTGCTCTTTCTTTTCAGAAGTATCAGATTGATGAGCTTGGTAAGGAGATTCGTCCTTGTCGTCTTAAGAAGCGTCCT |
| | | CCTGTTCGTUGA |
| Exemplary | 246 | ATGGCCGCCTTCAAGCCCAACTCCATCAACTACATCCTGGGCCTGGACATCGGCATCGCCTCCGTGGGCTGGGCCATGGTGGA |
| open | | GATCGACGAGGAGGAGAACCCCATCCGGCTGATCGACCTGGGCGTGCGGGTGTTCGAGCGGGCCGAGGTGCCCAAGACCGGCG |
| reading | | ACTCCCTGGCCATGGCCCGGCGGCTGGCCCGGTCCGTGCGGCGGCTGACCCGGCGGCGGGCCCACCGGCTGCTGCGGACCCGG |
| frame for | | CGGCTGCTGAAGCGGGAGGGCGTGCTGCAGGCCGCCAACTTCGACGAGAACGGCCTGATCAAGTCCCTGCCCAACACCCCCTG |
| Nme1Cas9 | | GCAGCTGCGGGCCGCCGCCCTGGACCGGAAGCTGACCCCCCTGGAGTGGTCCGCCGTGCTGCTGCACCTGATCAAGCACCGGG |
| HNH | | GCTACCTGTCCCAGCGGAAGAACGAGGGCGAGACCGCCGACAAGGAGCTGGGCGCCCTGCTGAAGGGCGTGGCCGGCAACGCC |
| nickase | | CACGCCCTGCAGACCGGCGACTTCCGGACCCCCGCCGAGCTGGCCCTGAACAAGTTCGAGAAGGAGTCCGGCCACATCCGGAA |
| | | CCAGCGGTCCGACTACTCCCACACCTTCTCCCGGAAGGACCTGCAGGCCGAGCTGATCCTGCTGTTCGAGAAGCAGAAGGAGT |
| | | TCGGCAACCCCCACGTGTCCGGCGGCCTGAAGGAGGGCATCGAGACCCTGCTGATGACCCAGCGGCCCGCCCTGTCCGGCGAC |
| | | GCCGTGCAGAAGATGCTGGGCCACTGCACCTTCGAGCCCGCCGAGCCCAAGGCCGCCAAGAACACCTACACCGCCGAGCGGTT |
| | | CATCTGGCTGACCAAGCTGAACAACCTGCGGATCCTGGAGCAGGGCTCCGAGCGGCCCCTGACCGACACCGAGCGGGCCACCC |
| | | TGATGGACGAGCCCTACCGGAAGTCCAAGCTGACCTACGCCCAGGCCCGGAAGCTGCTGGGCCTGGAGGACACCGCCTTCTTC |
| | | AAGGGCCTGCGGTACGGCAAGGACAACGCCGAGGCCTCCACCCTGATGGAGATGAAGGCCTACCACGCCATCTCCCGGGCCCT |
| | | GGAGAAGGAGGGCCTGAAGGACAAGAAGTCCCCCCTGAACCTGTCCCCCGAGCTGCAGGACGAGATCGGCACCGCCTTCTCCC |
| | | TGTTCAAGACCGACGAGGACATCACCGGCCGGCTGAAGGACCGGATCCAGCCCGAGATCCTGGAGGCCCTGCTGAAGCACATC |
| | | TCCTTCGACAAGTTCGTGCAGATCTCCCTGAAGGCCCTGCGGCGGATCGTGCCCCTGATGGAGCAGGGCAAGCGGTACGACGA |
| | | GGCCTGCGCCGAGATCTACGGCGACCACTACGGCAAGAAGAACACCGAGGAGAAGATCTACCTGCCCCCCATCCCCGCCGACG |
| | | AGATCCGGAACCCCGTGGTGCTGCGGGCCCTGTCCCAGGCCCGGAAGGTGATCAACGGCGTGGTGCGGCGGTACGGCTCCCCC |
| | | GCCCGGATCCACATCGAGACCGCCCGGGAGGTGGGCAAGTCCTTCAAGGACCGGAAGGAGATCGAGAAGCGGCAGGAGGAGAA |
| | | CCGGAAGGACCGGGAGAAGGCCGCCGCCAAGTTCCGGGAGTACTTCCCCAACTTCGTGGGCGAGCCCAAGTCCAAGGACATCC |
| | | TGAAGCTGCGGCTGTACGAGCAGCAGCACGGCAAGTGCCTGTACTCCGGCAAGGAGATCAACCTGGGCCGGCTGAACGAGAAG |
| | | GGCTACGTGGAGATCGACGCCGCCCTGCCCTTCTCCCGGACCTGGGACGACTCCTTCAACAACAAGGTGCTGGTGCTGGGCTC |
| | | CGAGAACCAGAACAAGGGCAACCAGACCCCCTACGAGTACTTCAACGGCAAGGACAACTCCCGGGAGTGGCAGGAGTTCAAGG |
| | | CCCGGGTGGAGACCTCCCGGTTCCCCCGGTCCAAGAAGCAGCGGATCCTGCTGCAGAAGTTCGACGAGGACGGCTTCAAGGAG |
| | | CGGAACCTGAACGACACCCGGTACGTGAACCGGTTCCTGTGCCAGTTCGTGGCCGACCGGATGCGGCTGACCGGCAAGGGCAA |
| | | GAAGCGGGTGTTCGCCTCCAACGGCCAGATCACCAACCTGCTGCGGGGCTTCTGGGGCCTGCGGAAGGTGCGGGCCGAGAACG |
| | | ACCGGCACCACGCCCTGGACGCCGTGGTGGTGGCCTGCTCCACCGTGGCCATGCAGCAGAAGATCACCCGGTTCGTGCGGTAC |
| | | AAGGAGATGAACGCCTTCGACGGCAAGACCATCGACAAGGAGACCGGCGAGGTGCTGCACCAGAAGACCCACTTCCCCCAGCC |
| | | CTGGGAGTTCTTCGCCCAGGAGGTGATGATCCGGGTGTTCGGCAAGCCCGACGGCAAGCCCGAGTTCGAGGAGGCCGACACCC |
| | | TGGAGAAGCTGCGGACCCTGCTGGCCGAGAAGCTGTCCTCCCGGCCCGAGGCCGTGCACGAGTACGTGACCCCCCTGTTCGTG |
| | | TCCCGGGCCCCCAACCGGAAGATGTCCGGCCAGGGCCACATGGAGACCGTGAAGTCCGCCAAGCGGCTGGACGAGGGCGTGTC |
| | | CGTGCTGCGGGTGCCCCTGACCCAGCTGAAGCTGAAGGACCTGGAGAAGATGGTGAACCGGGAGCGGGAGCCCAAGCTGTACG |
| | | AGGCCCTGAAGGCCCGGCTGGAGGCCCACAAGGACGACCCCGCCAAGGCCTTCGCCGAGCCCTTCTACAAGTACGACAAGGCC |
| | | GGCAACCGGACCCAGCAGGTGAAGGCCGTGCGGGTGGAGCAGGTGCAGAAGACCGGCGTGTGGGTGCGGAACCACAACGGCAT |
| | | CGCCGACAACGCCACCATGGTGCGGGTGGACGTGTTCGAGAAGGGCGACAAGTACTACCTGGTGCCCATCTACTCCTGGCAGG |
| | | TGGCCAAGGGCATCCTGCCCGACCGGGCCGTGGTGCAGGGCAAGGACGAGGAGGACTGGCAGCTGATCGACGACTCCTTCAAC |
| | | TTCAAGTTCTCCCTGCACCCCAACGACCTGGTGGAGGTGATCACCAAGAAGGCCCGGATGTTCGGCTACTTCGCCTCCTGCCA |
| | | CCGGGGCACCGGCAACATCAACATCCGGATCCACGACCTGGACCACAAGATCGGCAAGAACGGCATCCTGGAGGGCATCGGCG |
| | | TGAAGACCGCCCTGTCCTTCCAGAAGTACCAGATCGACGAGCTGGGCAAGGAGATCCGGCCCTGCCGGCTGAAGAAGCGGCCC |
| | | CCCGTGCGGUGA |
| Exemplary | 247 | ATGGCAGCATTCAAACCAAACTCAATCAACTACATCCTAGGACTAGACATCGGAATCGCATCAGTAGGATGAGCAATGGTAGA |
| open | | AATCGACGAAGAAGAAAACCCAATCCGACTAATCGACCTAGGAGTACGAGTATTCGAACGAGCAGAAGTACCAAAAACAGGAG |
| reading | | ACTCACTAGCAATGGCACGACGACTAGCACGATCAGTACGACGACTAACACGACGACGAGCACACCGACTACTACGAACACGA |
| frame for | | CGACTACTAAAACGAGAAGGAGTACTACAAGCAGCAAACTTCGACGAAAACGGACTAATCAAATCACTACCAAACACACCATG |
| Nme1Cas9 | | ACAACTACGAGCAGCAGCACTAGACCGAAAACTAACACCACTAGAATGATCAGCAGTACTACTACACCTAATCAAACACCGAG |
| HNH | | GATACCTATCACAACGAAAAAACGAAGGAGAAACAGCAGACAAAGAACTAGGAGCACTACTAAAAGGAGTAGCAGGAAACGCA |
| nickase | | CACGCACTACAAACAGGAGACTTCCGAACACCAGCAGAACTAGCACTAAACAAATTCGAAAAAGAATCAGGACACATCCGAAA |
| | | CCAACGATCAGACTACTCACACACATTCTCACGAAAAGACCTACAAGCAGAACTAATCCTACTATTCGAAAAACAAAAAGAAT |
| | | TCGGAAACCCACACGTATCAGGAGGACTAAAAGAAGGAATCGAAACACTACTAATGACACAACGACCAGCACTATCAGGAGAC |
| | | GCAGTACAAAAAATGCTAGGACACTGCACATTCGAACCAGCAGAACCAAAAGCAGCAAAAAACACATACACAGCAGAACGATT |
| | | CATCTGACTAACAAAACTAAACAACCTACGAATCCTAGAACAAGGATCAGAACGACCACTAACAGACACAGAACGAGCAACAC |
| | | TAATGGACGAACCATACCGAAAATCAAAACTAACATACGCACAAGCACGAAAACTACTAGGACTAGAAGACACAGCATTCTTC |
| | | AAAGGACTACGATACGGAAAAGACAACGCAGAAGCATCAACACTAATGGAAATGAAAGCATACCACGCAATCTCACGAGCACT |
| | | AGAAAAAGAAGGACTAAAAGACAAAAAATCACCACTAAACCTATCACCAGAACTACAAGACGAAATCGGAACAGCATTCTCAC |
| | | TATTCAAAACAGACGAAGACATCACAGGACGACTAAAAGACCGAATCCAACCAGAAATCCTAGAAGCACTACTAAAACACATC |
| | | TCATTCGACAAATTCGTACAAATCTCACTAAAAGCACTACGACGAATCGTACCACTAATGGAACAAGGAAAACGATACGACGA |
| | | AGCATGCGCAGAAATCTACGGAGACCACTACGGAAAAAAAAACACAGAAGAAAAAATCTACCTACCACCAATCCCAGCAGACG |
| | | AAATCCGAAACCCAGTAGTACTACGAGCACTATCACAAGCACGAAAAGTAATCAACGGAGTAGTACGACGATACGGATCACCA |
| | | GCACGAATCCACATCGAAACAGCACGAGAAGTAGGAAAATCATTCAAAGACCGAAAAGAAATCGAAAAACGACAAGAAGAAAA |
| | | CCGAAAAGACCGAGAAAAAGCAGCAGCAAAATTCCGAGAATACTTCCCAAACTTCGTAGGAGAACCAAAATCAAAAGACATCC |
| | | TAAAACTACGACTATACGAACAACAACACGGAAAATGCCTATACTCAGGAAAAGAAATCAACCTAGGACGACTAAACGAAAAA |
| | | GGATACGTAGAAATCGACGCAGCACTACCATTCTCACGAACATGAGACGACTCATTCAACAACAAAGTACTAGTACTAGGATC |
| | | AGAAAACCAAAACAAAGGAAACCAAACACCATACGAATACTTCAACGGAAAAGACAACTCACGAGAATGACAAGAATTCAAAG |
| | | CACGAGTAGAAACATCACGATTCCCACGATCAAAAAAACAACGAATCCTACTACAAAAATTCGACGAAGACGGATTCAAAGAA |
| | | CGAAACCTAAACGACACACGATACGTAAACCGATTCCTATGCCAATTCGTAGCAGACCGAATGCGACTAACAGGAAAAGGAAA |
| | | AAAACGAGTATTCGCATCAAACGGACAAATCACAAACCTACTACGAGGATTCTGAGGACTACGAAAAGTACGAGCAGAAAACG |
| | | ACCGACACCACGCACTAGACGCAGTAGTAGTAGCATGCTCAACAGTAGCAATGCAACAAAAAATCACACGATTCGTACGATAC |
| | | AAAGAAATGAACGCATTCGACGGAAAAACAATCGACAAAGAAACAGGAGAAGTACTACACCAAAAAACACACTTCCCACAACC |
| | | ATGAGAATTCTTCGCACAAGAAGTAATGATCCGAGTATTCGGAAAACCAGACGGAAAACCAGAATTCGAAGAAGCAGACACAC |
| | | TAGAAAAACTACGAACACTACTAGCAGAAAAACTATCATCACGACCAGAAGCAGTACACGAATACGTAACACCACTATTCGTA |
| | | TCACGAGCACCAAACCGAAAAATGTCAGGACAAGGACACATGGAAACAGTAAAATCAGCAAAACGACTAGACGAAGGAGTATC |
| | | AGTACTACGAGTACCACTAACACAACTAAAACTAAAAGACCTAGAAAAAATGGTAAACCGAGAACGAGAACCAAAACTATACG |
| | | AAGCACTAAAAGCACGACTAGAAGCACACAAAGACGACCCAGCAAAAGCATTCGCAGAACCATTCTACAAATACGACAAAGCA |
| | | GGAAACCGAACACAACAAGTAAAAGCAGTACGAGTAGAACAAGTACAAAAAACAGGAGTATGAGTACGAAACCACAACGGAAT |
| | | CGCAGACAACGCAACAATGGTACGAGTAGACGTATTCGAAAAAGGAGACAAATACTACCTAGTACCAATCTACTCATGACAAG |
| | | TAGCAAAAGGAATCCTACCAGACCGAGCAGTAGTACAAGGAAAAGACGAAGAAGACTGACAACTAATCGACGACTCATTCAAC |
| | | TTCAAATTCTCACTACACCCAAACGACCTAGTAGAAGTAATCACAAAAAAAGCACGAATGTTCGGATACTTCGCATCATGCCA |
| | | CCGAGGAACAGGAAACATCAACATCCGAATCCACGACCTAGACCACAAAATCGGAAAAAACGGAATCCTAGAAGGAATCGGAG |
| | | TAAAAACAGCACTATCATTCCAAAAATACCAAATCGACGAACTAGGAAAAGAAATCCGACCATGCCGACTAAAAAAACGACCA |
| | | CCAGTACGAUAA |
| Exemplary | 248 | MAAFKPNPINYILGLDIGIASVGWAMVEIDEEENPIRLIDLGVRVFERAEVPKTGDSLAMARRLARSVRRLTRRRAHRLLRAR |
| amino | | RLLKREGVLQAADFDENGLIKSLPNTPWQLRAAALDRKLTPLEWSAVLLHLIKHRGYLSQRKNEGETADKELGALLKGVANNA |
| acid | | HALQTGDFRTPAELALNKFEKESGHIRNQRGDYSHTFSRKDLQAELILLFEKQKEFGNPHVSGGLKEGIETLLMTQRPALSGD |
| sequence | | AVQKMLGHCTFEPAEPKAAKNTYTAERFIWLTKLNNLRILEQGSERPLTDTERATLMDEPYRKSKLTYAQARKLLGLEDTAFF |
| of | | KGLRYGKDNAEASTLMEMKAYHAISRALEKEGLKDKKSPLNLSSELQDEIGTAFSLEKTDEDITGRLKDRVQPEILEALLKHI |
| Nme2Cas9 | | SFDKFVQISLKALRRIVPLMEQGKRYDEACAEIYGDHYGKKNTEEKIYLPPIPADEIRNPVVLRALSQARKVINGVVRRYGSP |
| cleavase | | ARIHIETAREVGKSFKDRKEIEKRQEENRKDREKAAAKFREYFPNFVGEPKSKDILKLRLYEQQHGKCLYSGKEINLVRLNEK |
| | | GYVEIDHALPFSRTWDDSFNNKVLVLGSFNQNKGNQTPYEYENGKDNSREWQEFKARVETSRFPRSKKQRILLQKFDEDGEKE |
| | | CNLNDTRYVNRFLCQFVADHILLTGKGKRRVFASNGQITNLLRGFWGLRKVRAENDRHHALDAVVVACSTVAMQQKITREVRY |
| | | KEMNAFDGKTIDKETGKVLHQKTHFPQPWEFFAQEVMIRVFGKPDGKPEFEEADTPEKLRTLLAEKLSSRPEAVHEYVTPLFV |
| | | SRAPNRKMSGAHKDTLRSAKRFVKHNEKISVKRVWLTEIKLADLENMVNYKNGREIELYEALKARLEAYGGNAKQAFDPKDNP |
| | | FYKKGGQLVKAVRVEKTQESGVLLNKKNAYTIADNGDMVRVDVFCKVDKKGKNQYFIVPIYAWQVAENILPDIDCKGYRIDDS |
| | | YTFCFSLHKYDLIAFQKDEKSKVEFAYYINCDSSNGRFYLAWHDKGSKEQQFRISTQNLVLIQKYQVNELGKEIRPCRLKKRP |
| | | PVR |
| Exemplary | 249 | GCTGCTTTTAAGCCTAATCCTATTAATTATATTCTTGGTCTTGATATTGGTATTGCTTCTGTTGGTTGGGCTATGGTTGAGAT |
| coding | | TGATGAGGAGGAGAATCCTATTCGTCTTATTGATCTTGGTGTTCGTGTTTTTGAGCGTGCTGAGGTTCCTAAGACTGGTGATT |
| sequence | | CTCTTGCTATGGCTCGTCGTCTTGCTCGTTCTGTTCGTCGTCTTACTCGTCGTCGTGCTCATCGTCTTCTTCGTGCTCGTCGT |
| encoding | | CTTCTTAAGCGTGAGGGTGTTCTTCAGGCTGCTGATTTTGATGAGAATGGTCTTATTAAGTCTCTTCCTAATACTCCTTGGCA |
| Nme2Cas9 | | GCTTCGTGCTGCTGCTCTTGATCGTAAGCTTACTCCTCTTGAGTGGTCTGCTGTTCTTCTTCATCTTATTAAGCATCGTGGTT |
| cleavase | | ATCTTTCTCAGCGTAAGAATGAGGGTGAGACTGCTGATAAGGAGCTTGGTGCTCTTCTTAAGGGTGTTGCTAATAATGCTCAT |
| | | GCTCTTCAGACTGGTGATTTTCGTACTCCTGCTGAGCTTGCTCTTAATAAGTTTGAGAAGGAGTCTGGTCATATTCGTAATCA |
| | | GCGTGGTGATTATTCTCATACTTTTTCTCGTAAGGATCTTCAGGCTGAGCTTATTCTTCTTTTTGAGAAGCAGAAGGAGTTTG |
| | | GTAATCCTCATGTTTCTGGTGGTCTTAAGGAGGGTATTGAGACTCTTCTTATGACTCAGCGTCCTGCTCTTTCTGGTGATGCT |
| | | GTTCAGAAGATGCTTGGTCATTGTACTTTTGAGCCTGCTGAGCCTAAGGCTGCTAAGAATACTTATACTGCTGAGCGTTTTAT |
| | | TTGGCTTACTAAGCTTAATAATCTTCGTATTCTTGAGCAGGGTTCTGAGCGTCCTCTTACTGATACTGAGCGTGCTACTCTTA |
| | | TGGATGAGCCTTATCGTAAGTCTAAGCTTACTTATGCTCAGGCTCGTAAGCTTCTTGGTCTTGAGGATACTGCTTTTTTTAAG |
| | | GGTCTTCGTTATGGTAAGGATAATGCTGAGGCTTCTACTCTTATGGAGATGAAGGCTTATCATGCTATTTCTCGTGCTCTTGA |
| | | GAAGGAGGGTCTTAAGGATAAGAAGTCTCCTCTTAATCTTTCTTCTGAGCTTCAGGATGAGATTGGTACTGCTTTTTCTCTTT |
| | | TTAAGACTGATGAGGATATTACTGGTCGTCTTAAGGATCGTGTTCAGCCTGAGATTCTTGAGGCTCTTCTTAAGCATATTTCT |
| | | TTTGATAAGTTTGTTCAGATTTCTCTTAAGGCTCTTCGTCGTATTGTTCCTCTTATGGAGCAGGGTAAGCGTTATGATGAGGC |
| | | TTGTGCTGAGATTTATGGTGATCATTATGGTAAGAAGAATACTGAGGAGAAGATTTATCTTCCTCCTATTCCTGCTGATGAGA |
| | | TTCGTAATCCTGTTGTTCTTCGTGCTCTTTCTCAGGCTCGTAAGGTTATTAATGGTGTTGTTCGTCGTTATGGTTCTCCTGCT |
| | | CGTATTCATATTGAGACTGCTCGTGAGGTTGGTAAGTCTTTTAAGGATCGTAAGGAGATTGAGAAGCGTCAGGAGGAGAATCG |
| | | TAAGGATCGTGAGAAGGCTGCTGCTAAGTTTCGTGAGTATTTTCCTAATTTTGTTGGTGAGCCTAAGTCTAAGGATATTCTTA |
| | | AGCTTCGTCTTTATGAGCAGCAGCATGGTAAGTGTCTTTATTCTGGTAAGGAGATTAATCTTGTTCGTCTTAATGAGAAGGGT |
| | | TATGTTGAGATTGATCATGCTCTTCCTTTTTCTCGTACTTGGGATGATTCTTTTAATAATAAGGTTCTTGTTCTTGGTTCTGA |
| | | GAATCAGAATAAGGGTAATCAGACTCCTTATGAGTATTTTAATGGTAAGGATAATTCTCGTGAGTGGCAGGAGTTTAAGGCTC |
| | | GTGTTGAGACTTCTCGTTTTCCTCGTTCTAAGAAGCAGCGTATTCTTCTTCAGAAGTTTGATGAGGATGGTTTTAAGGAGTGT |
| | | AATCTTAATGATACTCGTTATGTTAATCGTTTTCTTTGTCAGTTTGTTGCTGATCATATTCTTCTTACTGGTAAGGGTAAGCG |
| | | TCGTGTTTTTGCTTCTAATGGTCAGATTACTAATCTTCTTCGTGGTTTTTGGGGTCTTCGTAAGGTTCGTGCTGAGAATGATC |
| | | GTCATCATGCTCTTGATGCTGTTGTTGTTGCTTGTTCTACTGTTGCTATGCAGCAGAAGATTACTCGTTTTGTTCGTTATAAG |
| | | GAGATGAATGCTTTTGATGGTAAGACTATTGATAAGGAGACTGGTAAGGTTCTTCATCAGAAGACTCATTTTCCTCAGCCTTG |
| | | GGAGTTTTTTGCTCAGGAGGTTATGATTCGTGTTTTTGGTAAGCCTGATGGTAAGCCTGAGTTTGAGGAGGCTGATACTCCTG |
| | | AGAAGCTTCGTACTCTTCTTGCTGAGAAGCTTTCTTCTCGTCCTGAGGCTGTTCATGAGTATGTTACTCCTCTTTTTGTTTCT |
| | | CGTGCTCCTAATCGTAAGATGTCTGGTGCTCATAAGGATACTCTTCGTTCTGCTAAGCGTTTTGTTAAGCATAATGAGAAGAT |
| | | TTCTGTTAAGCGTGTTTGGCTTACTGAGATTAAGCTTGCTGATCTTGAGAATATGGTTAATTATAAGAATGGTCGTGAGATTG |
| | | AGCTTTATGAGGCTCTTAAGGCTCGTCTTGAGGCTTATGGTGGTAATGCTAAGCAGGCTTTTGATCCTAAGGATAATCCTTTT |
| | | TATAAGAAGGGTGGTCAGCTTGTTAAGGCTGTTCGTGTTGAGAAGACTCAGGAGTCTGGTGTTCTTCTTAATAAGAAGAATGC |
| | | TTATACTATTGCTGATAATGGTGATATGGTTCGTGTTGATGTTTTTTGTAAGGTTGATAAGAAGGGTAAGAATCAGTATTTTA |
| | | TTGTTCCTATTTATGCTTGGCAGGTTGCTGAGAATATTCTTCCTGATATTGATTGTAAGGGTTATCGTATTGATGATTCTTAT |
| | | ACTTTTTGTTTTTCTCTTCATAAGTATGATCTTATTGCTTTTCAGAAGGATGAGAAGTCTAAGGTTGAGTTTGCTTATTATAT |
| | | TAATTGTGATTCTTCTAATGGTCGTTTTTATCTTGCTTGGCATGATAAGGGTTCTAAGGAGCAGCAGTTTCGTATTTCTACTC |
| | | AGAATCTTGTTCTTATTCAGAAGTATCAGGTTAATGAGCTTGGTAAGGAGATTCGTCCTTGTCGTCTTAAGAAGCGTCCTCCT |
| | | GTTCGT |
| Exemplary | 250 | GCCGCCTTCAAGCCCAACCCCATCAACTACATCCTGGGCCTGGACATCGGCATCGCCTCCGTGGGCTGGGCCATGGTGGAGAT |
| coding | | CGACGAGGAGGAGAACCCCATCCGGCTGATCGACCTGGGCGTGCGGGTGTTCGAGCGGGCCGAGGTGCCCAAGACCGGCGACT |
| sequence | | CCCTGGCCATGGCCCGGCGGCTGGCCCGGTCCGTGCGGCGGCTGACCCGGCGGCGGGCCCACCGGCTGCTGCGGGCCCGGCGG |
| encoding | | CTGCTGAAGCGGGAGGGCGTGCTGCAGGCCGCCGACTTCGACGAGAACGGCCTGATCAAGTCCCTGCCCAACACCCCCTGGCA |
| Nme2Cas9 | | GCTGCGGGCCGCCGCCCTGGACCGGAAGCTGACCCCCCTGGAGTGGTCCGCCGTGCTGCTGCACCTGATCAAGCACCGGGGCT |
| cleavase | | ACCTGTCCCAGCGGAAGAACGAGGGCGAGACCGCCGACAAGGAGCTGGGCGCCCTGCTGAAGGGCGTGGCCAACAACGCCCAC |
| | | GCCCTGCAGACCGGCGACTTCCGGACCCCCGCCGAGCTGGCCCTGAACAAGTTCGAGAAGGAGTCCGGCCACATCCGGAACCA |
| | | GCGGGGCGACTACTCCCACACCTTCTCCCGGAAGGACCTGCAGGCCGAGCTGATCCTGCTGTTCGAGAAGCAGAAGGAGTTCG |
| | | GCAACCCCCACGTGTCCGGCGGCCTGAAGGAGGGCATCGAGACCCTGCTGATGACCCAGCGGCCCGCCCTGTCCGGCGACGCC |
| | | GTGCAGAAGATGCTGGGCCACTGCACCTTCGAGCCCGCCGAGCCCAAGGCCGCCAAGAACACCTACACCGCCGAGCGGTTCAT |
| | | CTGGCTGACCAAGCTGAACAACCTGCGGATCCTGGAGCAGGGCTCCGAGCGGCCCCTGACCGACACCGAGCGGGCCACCCTGA |
| | | TGGACGAGCCCTACCGGAAGTCCAAGCTGACCTACGCCCAGGCCCGGAAGCTGCTGGGCCTGGAGGACACCGCCTTCTTCAAG |
| | | GGCCTGCGGTACGGCAAGGACAACGCCGAGGCCTCCACCCTGATGGAGATGAAGGCCTACCACGCCATCTCCCGGGCCCTGGA |
| | | GAAGGAGGGCCTGAAGGACAAGAAGTCCCCCCTGAACCTGTCCTCCGAGCTGCAGGACGAGATCGGCACCGCCTTCTCCCTGT |
| | | TCAAGACCGACGAGGACATCACCGGCCGGCTGAAGGACCGGGTGCAGCCCGAGATCCTGGAGGCCCTGCTGAAGCACATCTCC |
| | | TTCGACAAGTTCGTGCAGATCTCCCTGAAGGCCCTGCGGCGGATCGTGCCCCTGATGGAGCAGGGCAAGCGGTACGACGAGGC |
| | | CTGCGCCGAGATCTACGGCGACCACTACGGCAAGAAGAACACCGAGGAGAAGATCTACCTGCCCCCCATCCCCGCCGACGAGA |
| | | TCCGGAACCCCGTGGTGCTGCGGGCCCTGTCCCAGGCCCGGAAGGTGATCAACGGCGTGGTGCGGCGGTACGGCTCCCCCGCC |
| | | CGGATCCACATCGAGACCGCCCGGGAGGTGGGCAAGTCCTTCAAGGACCGGAAGGAGATCGAGAAGCGGCAGGAGGAGAACCG |
| | | GAAGGACCGGGAGAAGGCCGCCGCCAAGTTCCGGGAGTACTTCCCCAACTTCGTGGGCGAGCCCAAGTCCAAGGACATCCTGA |
| | | AGCTGCGGCTGTACGAGCAGCAGCACGGCAAGTGCCTGTACTCCGGCAAGGAGATCAACCTGGTGCGGCTGAACGAGAAGGGC |
| | | TACGTGGAGATCGACCACGCCCTGCCCTTCTCCCGGACCTGGGACGACTCCTTCAACAACAAGGTGCTGGTGCTGGGCTCCGA |
| | | GAACCAGAACAAGGGCAACCAGACCCCCTACGAGTACTTCAACGGCAAGGACAACTCCCGGGAGTGGCAGGAGTTCAAGGCCC |
| | | GGGTGGAGACCTCCCGGTTCCCCCGGTCCAAGAAGCAGCGGATCCTGCTGCAGAAGTTCGACGAGGACGGCTTCAAGGAGTGC |
| | | AACCTGAACGACACCCGGTACGTGAACCGGTTCCTGTGCCAGTTCGTGGCCGACCACATCCTGCTGACCGGCAAGGGCAAGCG |
| | | GCGGGTGTTCGCCTCCAACGGCCAGATCACCAACCTGCTGCGGGGCTTCTGGGGCCTGCGGAAGGTGCGGGCCGAGAACGACC |
| | | GGCACCACGCCCTGGACGCCGTGGTGGTGGCCTGCTCCACCGTGGCCATGCAGCAGAAGATCACCCGGTTCGTGCGGTACAAG |
| | | GAGATGAACGCCTTCGACGGCAAGACCATCGACAAGGAGACCGGCAAGGTGCTGCACCAGAAGACCCACTTCCCCCAGCCCTG |
| | | GGAGTTCTTCGCCCAGGAGGTGATGATCCGGGTGTTCGGCAAGCCCGACGGCAAGCCCGAGTTCGAGGAGGCCGACACCCCCG |
| | | AGAAGCTGCGGACCCTGCTGGCCGAGAAGCTGTCCTCCCGGCCCGAGGCCGTGCACGAGTACGTGACCCCCCTGTTCGTGTCC |
| | | CGGGCCCCCAACCGGAAGATGTCCGGCGCCCACAAGGACACCCTGCGGTCCGCCAAGCGGTTCGTGAAGCACAACGAGAAGAT |
| | | CTCCGTGAAGCGGGTGTGGCTGACCGAGATCAAGCTGGCCGACCTGGAGAACATGGTGAACTACAAGAACGGCCGGGAGATCG |
| | | AGCTGTACGAGGCCCTGAAGGCCCGGCTGGAGGCCTACGGCGGCAACGCCAAGCAGGCCTTCGACCCCAAGGACAACCCCTTC |
| | | TACAAGAAGGGCGGCCAGCTGGTGAAGGCCGTGCGGGTGGAGAAGACCCAGGAGTCCGGCGTGCTGCTGAACAAGAAGAACGC |
| | | CTACACCATCGCCGACAACGGCGACATGGTGCGGGTGGACGTGTTCTGCAAGGTGGACAAGAAGGGCAAGAACCAGTACTTCA |
| | | TCGTGCCCATCTACGCCTGGCAGGTGGCCGAGAACATCCTGCCCGACATCGACTGCAAGGGCTACCGGATCGACGACTCCTAC |
| | | ACCTTCTGCTTCTCCCTGCACAAGTACGACCTGATCGCCTTCCAGAAGGACGAGAAGTCCAAGGTGGAGTTCGCCTACTACAT |
| | | CAACTGCGACTCCTCCAACGGCCGGTTCTACCTGGCCTGGCACGACAAGGGCTCCAAGGAGCAGCAGTTCCGGATCTCCACCC |
| | | AGAACCTGGTGCTGATCCAGAAGTACCAGGTGAACGAGCTGGGCAAGGAGATCCGGCCCTGCCGGCTGAAGAAGCGGCCCCCC |
| | | GTGCGG |
| Exemplary | 251 | GCAGCATTCAAACCAAACCCAATCAACTACATCCTAGGACTAGACATCGGAATCGCATCAGTAGGATGAGCAATGGTAGAAAT |
| coding | | CGACGAAGAAGAAAACCCAATCCGACTAATCGACCTAGGAGTACGAGTATTCGAACGAGCAGAAGTACCAAAAACAGGAGACT |
| sequence | | CACTAGCAATGGCACGACGACTAGCACGATCAGTACGACGACTAACACGACGACGAGCACACCGACTACTACGAGCACGACGA |
| encoding | | CTACTAAAACGAGAAGGAGTACTACAAGCAGCAGACTTCGACGAAAACGGACTAATCAAATCACTACCAAACACACCATGACA |
| Nme2Cas9 | | ACTACGAGCAGCAGCACTAGACCGAAAACTAACACCACTAGAATGATCAGCAGTACTACTACACCTAATCAAACACCGAGGAT |
| cleavase | | ACCTATCACAACGAAAAAACGAAGGAGAAACAGCAGACAAAGAACTAGGAGCACTACTAAAAGGAGTAGCAAACAACGCACAC |
| | | GCACTACAAACAGGAGACTTCCGAACACCAGCAGAACTAGCACTAAACAAATTCGAAAAAGAATCAGGACACATCCGAAACCA |
| | | ACGAGGAGACTACTCACACACATTCTCACGAAAAGACCTACAAGCAGAACTAATCCTACTATTCGAAAAACAAAAAGAATTCG |
| | | GAAACCCACACGTATCAGGAGGACTAAAAGAAGGAATCGAAACACTACTAATGACACAACGACCAGCACTATCAGGAGACGCA |
| | | GTACAAAAAATGCTAGGACACTGCACATTCGAACCAGCAGAACCAAAAGCAGCAAAAAACACATACACAGCAGAACGATTCAT |
| | | CTGACTAACAAAACTAAACAACCTACGAATCCTAGAACAAGGATCAGAACGACCACTAACAGACACAGAACGAGCAACACTAA |
| | | TGGACGAACCATACCGAAAATCAAAACTAACATACGCACAAGCACGAAAACTACTAGGACTAGAAGACACAGCATTCTTCAAA |
| | | GGACTACGATACGGAAAAGACAACGCAGAAGCATCAACACTAATGGAAATGAAAGCATACCACGCAATCTCACGAGCACTAGA |
| | | AAAAGAAGGACTAAAAGACAAAAAATCACCACTAAACCTATCATCAGAACTACAAGACGAAATCGGAACAGCATTCTCACTAT |
| | | TCAAAACAGACGAAGACATCACAGGACGACTAAAAGACCGAGTACAACCAGAAATCCTAGAAGCACTACTAAAACACATCTCA |
| | | TTCGACAAATTCGTACAAATCTCACTAAAAGCACTACGACGAATCGTACCACTAATGGAACAAGGAAAACGATACGACGAAGC |
| | | ATGCGCAGAAATCTACGGAGACCACTACGGAAAAAAAAACACAGAAGAAAAAATCTACCTACCACCAATCCCAGCAGACGAAA |
| | | TCCGAAACCCAGTAGTACTACGAGCACTATCACAAGCACGAAAAGTAATCAACGGAGTAGTACGACGATACGGATCACCAGCA |
| | | CGAATCCACATCGAAACAGCACGAGAAGTAGGAAAATCATTCAAAGACCGAAAAGAAATCGAAAAACGACAAGAAGAAAACCG |
| | | AAAAGACCGAGAAAAAGCAGCAGCAAAATTCCGAGAATACTTCCCAAACTTCGTAGGAGAACCAAAATCAAAAGACATCCTAA |
| | | AACTACGACTATACGAACAACAACACGGAAAATGCCTATACTCAGGAAAAGAAATCAACCTAGTACGACTAAACGAAAAAGGA |
| | | TACGTAGAAATCGACCACGCACTACCATTCTCACGAACATGAGACGACTCATTCAACAACAAAGTACTAGTACTAGGATCAGA |
| | | AAACCAAAACAAAGGAAACCAAACACCATACGAATACTTCAACGGAAAAGACAACTCACGAGAATGACAAGAATTCAAAGCAC |
| | | GAGTAGAAACATCACGATTCCCACGATCAAAAAAACAACGAATCCTACTACAAAAATTCGACGAAGACGGATTCAAAGAATGC |
| | | AACCTAAACGACACACGATACGTAAACCGATTCCTATGCCAATTCGTAGCAGACCACATCCTACTAACAGGAAAAGGAAAACG |
| | | ACGAGTATTCGCATCAAACGGACAAATCACAAACCTACTACGAGGATTCTGAGGACTACGAAAAGTACGAGCAGAAAACGACC |
| | | GACACCACGCACTAGACGCAGTAGTAGTAGCATGCTCAACAGTAGCAATGCAACAAAAAATCACACGATTCGTACGATACAAA |
| | | GAAATGAACGCATTCGACGGAAAAACAATCGACAAAGAAACAGGAAAAGTACTACACCAAAAAACACACTTCCCACAACCATG |
| | | AGAATTCTTCGCACAAGAAGTAATGATCCGAGTATTCGGAAAACCAGACGGAAAACCAGAATTCGAAGAAGCAGACACACCAG |
| | | AAAAACTACGAACACTACTAGCAGAAAAACTATCATCACGACCAGAAGCAGTACACGAATACGTAACACCACTATTCGTATCA |
| | | CGAGCACCAAACCGAAAAATGTCAGGAGCACACAAAGACACACTACGATCAGCAAAACGATTCGTAAAACACAACGAAAAAAT |
| | | CTCAGTAAAACGAGTATGACTAACAGAAATCAAACTAGCAGACCTAGAAAACATGGTAAACTACAAAAACGGACGAGAAATCG |
| | | AACTATACGAAGCACTAAAAGCACGACTAGAAGCATACGGAGGAAACGCAAAACAAGCATTCGACCCAAAAGACAACCCATTC |
| | | TACAAAAAAGGAGGACAACTAGTAAAAGCAGTACGAGTAGAAAAAACACAAGAATCAGGAGTACTACTAAACAAAAAAAACGC |
| | | ATACACAATCGCAGACAACGGAGACATGGTACGAGTAGACGTATTCTGCAAAGTAGACAAAAAAGGAAAAAACCAATACTTCA |
| | | TCGTACCAATCTACGCATGACAAGTAGCAGAAAACATCCTACCAGACATCGACTGCAAAGGATACCGAATCGACGACTCATAC |
| | | ACATTCTGCTTCTCACTACACAAATACGACCTAATCGCATTCCAAAAAGACGAAAAATCAAAAGTAGAATTCGCATACTACAT |
| | | CAACTGCGACTCATCAAACGGACGATTCTACCTAGCATGACACGACAAAGGATCAAAAGAACAACAATTCCGAATCTCAACAC |
| | | AAAACCTAGTACTAATCCAAAAATACCAAGTAAACGAACTAGGAAAAGAAATCCGACCATGCCGACTAAAAAAACGACCACCA |
| | | GTACGA |
| Exemplary | 252 | ATGGCTGCTTTTAAGCCTAATCCTATTAATTATATTCTTGGTCTTGATATTGGTATTGCTTCTGTTGGTTGGGCTATGGTTGA |
| open | | GATTGATGAGGAGGAGAATCCTATTCGTCTTATTGATCTTGGTGTTCGTGTTTTTGAGCGTGCTGAGGTTCCTAAGACTGGTG |
| reading | | ATTCTCTTGCTATGGCTCGTCGTCTTGCTCGTTCTGTTCGTCGTCTTACTCGTCGTCGTGCTCATCGTCTTCTTCGTGCTCGT |
| frame for | | CGTCTTCTTAAGCGTGAGGGTGTTCTTCAGGCTGCTGATTTTGATGAGAATGGTCTTATTAAGTCTCTTCCTAATACTCCTTG |
| Nme2Cas9 | | GCAGCTTCGTGCTGCTGCTCTTGATCGTAAGCTTACTCCTCTTGAGTGGTCTGCTGTTCTTCTTCATCTTATTAAGCATCGTG |
| cleavase | | GTTATCTTTCTCAGCGTAAGAATGAGGGTGAGACTGCTGATAAGGAGCTTGGTGCTCTTCTTAAGGGTGTTGCTAATAATGCT |
| | | CATGCTCTTCAGACTGGTGATTTTCGTACTCCTGCTGAGCTTGCTCTTAATAAGTTTGAGAAGGAGTCTGGTCATATTCGTAA |
| | | TCAGCGTGGTGATTATTCTCATACTTTTTCTCGTAAGGATCTTCAGGCTGAGCTTATTCTTCTTTTTGAGAAGCAGAAGGAGT |
| | | TTGGTAATCCTCATGTTTCTGGTGGTCTTAAGGAGGGTATTGAGACTCTTCTTATGACTCAGCGTCCTGCTCTTTCTGGTGAT |
| | | GCTGTTCAGAAGATGCTTGGTCATTGTACTTTTGAGCCTGCTGAGCCTAAGGCTGCTAAGAATACTTATACTGCTGAGCGTTT |
| | | TATTTGGCTTACTAAGCTTAATAATCTTCGTATTCTTGAGCAGGGTTCTGAGCGTCCTCTTACTGATACTGAGCGTGCTACTC |
| | | TTATGGATGAGCCTTATCGTAAGTCTAAGCTTACTTATGCTCAGGCTCGTAAGCTTCTTGGTCTTGAGGATACTGCTTTTTTT |
| | | AAGGGTCTTCGTTATGGTAAGGATAATGCTGAGGCTTCTACTCTTATGGAGATGAAGGCTTATCATGCTATTTCTCGTGCTCT |
| | | TGAGAAGGAGGGTCTTAAGGATAAGAAGTCTCCTCTTAATCTTTCTTCTGAGCTTCAGGATGAGATTGGTACTGCTTTTTCTC |
| | | TTTTTAAGACTGATGAGGATATTACTGGTCGTCTTAAGGATCGTGTTCAGCCTGAGATTCTTGAGGCTCTTCTTAAGCATATT |
| | | TCTTTTGATAAGTTTGTTCAGATTTCTCTTAAGGCTCTTCGTCGTATTGTTCCTCTTATGGAGCAGGGTAAGCGTTATGATGA |
| | | GGCTTGTGCTGAGATTTATGGTGATCATTATGGTAAGAAGAATACTGAGGAGAAGATTTATCTTCCTCCTATTCCTGCTGATG |
| | | AGATTCGTAATCCTGTTGTTCTTCGTGCTCTTTCTCAGGCTCGTAAGGTTATTAATGGTGTTGTTCGTCGTTATGGTTCTCCT |
| | | GCTCGTATTCATATTGAGACTGCTCGTGAGGTTGGTAAGTCTTTTAAGGATCGTAAGGAGATTGAGAAGCGTCAGGAGGAGAA |
| | | TCGTAAGGATCGTGAGAAGGCTGCTGCTAAGTTTCGTGAGTATTTTCCTAATTTTGTTGGTGAGCCTAAGTCTAAGGATATTC |
| | | TTAAGCTTCGTCTTTATGAGCAGCAGCATGGTAAGTGTCTTTATTCTGGTAAGGAGATTAATCTTGTTCGTCTTAATGAGAAG |
| | | GGTTATGTTGAGATTGATCATGCTCTTCCTTTTTCTCGTACTTGGGATGATTCTTTTAATAATAAGGTTCTTGTTCTTGGTTC |
| | | TGAGAATCAGAATAAGGGTAATCAGACTCCTTATGAGTATTTTAATGGTAAGGATAATTCTCGTGAGTGGCAGGAGTTTAAGG |
| | | CTCGTGTTGAGACTTCTCGTTTTCCTCGTTCTAAGAAGCAGCGTATTCTTCTTCAGAAGTTTGATGAGGATGGTTTTAAGGAG |
| | | TGTAATCTTAATGATACTCGTTATGTTAATCGTTTTCTTTGTCAGTTTGTTGCTGATCATATTCTTCTTACTGGTAAGGGTAA |
| | | GCGTCGTGTTTTTGCTTCTAATGGTCAGATTACTAATCTTCTTCGTGGTTTTTGGGGTCTTCGTAAGGTTCGTGCTGAGAATG |
| | | ATCGTCATCATGCTCTTGATGCTGTTGTTGTTGCTTGTTCTACTGTTGCTATGCAGCAGAAGATTACTCGTTTTGTTCGTTAT |
| | | AAGGAGATGAATGCTTTTGATGGTAAGACTATTGATAAGGAGACTGGTAAGGTTCTTCATCAGAAGACTCATTTTCCTCAGCC |
| | | TTGGGAGTTTTTTGCTCAGGAGGTTATGATTCGTGTTTTTGGTAAGCCTGATGGTAAGCCTGAGTTTGAGGAGGCTGATACTC |
| | | CTGAGAAGCTTCGTACTCTTCTTGCTGAGAAGCTTTCTTCTCGTCCTGAGGCTGTTCATGAGTATGTTACTCCTCTTTTTGTT |
| | | TCTCGTGCTCCTAATCGTAAGATGTCTGGTGCTCATAAGGATACTCTTCGTTCTGCTAAGCGTTTTGTTAAGCATAATGAGAA |
| | | GATTTCTGTTAAGCGTGTTTGGCTTACTGAGATTAAGCTTGCTGATCTTGAGAATATGGTTAATTATAAGAATGGTCGTGAGA |
| | | TTGAGCTTTATGAGGCTCTTAAGGCTCGTCTTGAGGCTTATGGTGGTAATGCTAAGCAGGCTTTTGATCCTAAGGATAATCCT |
| | | TTTTATAAGAAGGGTGGTCAGCTTGTTAAGGCTGTTCGTGTTGAGAAGACTCAGGAGTCTGGTGTTCTTCTTAATAAGAAGAA |
| | | TGCTTATACTATTGCTGATAATGGTGATATGGTTCGTGTTGATGTTTTTTGTAAGGTTGATAAGAAGGGTAAGAATCAGTATT |
| | | TTATTGTTCCTATTTATGCTTGGCAGGTTGCTGAGAATATTCTTCCTGATATTGATTGTAAGGGTTATCGTATTGATGATTCT |
| | | TATACTTTTTGTTTTTCTCTTCATAAGTATGATCTTATTGCTTTTCAGAAGGATGAGAAGTCTAAGGTTGAGTTTGCTTATTA |
| | | TATTAATTGTGATTCTTCTAATGGTCGTTTTTATCTTGCTTGGCATGATAAGGGTTCTAAGGAGCAGCAGTTTCGTATTTCTA |
| | | CTCAGAATCTTGTTCTTATTCAGAAGTATCAGGTTAATGAGCTTGGTAAGGAGATTCGTCCTTGTCGTCTTAAGAAGCGTCCT |
| | | CCTGTTCGTUGA |
| Exemplary | 253 | ATGGCCGCCTTCAAGCCCAACCCCATCAACTACATCCTGGGCCTGGACATCGGCATCGCCTCCGTGGGCTGGGCCATGGTGGA |
| open | | GATCGACGAGGAGGAGAACCCCATCCGGCTGATCGACCTGGGCGTGCGGGTGTTCGAGCGGGCCGAGGTGCCCAAGACCGGCG |
| reading | | ACTCCCTGGCCATGGCCCGGCGGCTGGCCCGGTCCGTGCGGCGGCTGACCCGGCGGCGGGCCCACCGGCTGCTGCGGGCCCGG |
| frame for | | CGGCTGCTGAAGCGGGAGGGCGTGCTGCAGGCCGCCGACTTCGACGAGAACGGCCTGATCAAGTCCCTGCCCAACACCCCCTG |
| Nme2Cas9 | | GCAGCTGCGGGCCGCCGCCCTGGACCGGAAGCTGACCCCCCTGGAGTGGTCCGCCGTGCTGCTGCACCTGATCAAGCACCGGG |
| cleavase | | GCTACCTGTCCCAGCGGAAGAACGAGGGCGAGACCGCCGACAAGGAGCTGGGCGCCCTGCTGAAGGGCGTGGCCAACAACGCC |
| | | CACGCCCTGCAGACCGGCGACTTCCGGACCCCCGCCGAGCTGGCCCTGAACAAGTTCGAGAAGGAGTCCGGCCACATCCGGAA |
| | | CCAGCGGGGCGACTACTCCCACACCTTCTCCCGGAAGGACCTGCAGGCCGAGCTGATCCTGCTGTTCGAGAAGCAGAAGGAGT |
| | | TCGGCAACCCCCACGTGTCCGGCGGCCTGAAGGAGGGCATCGAGACCCTGCTGATGACCCAGCGGCCCGCCCTGTCCGGCGAC |
| | | GCCGTGCAGAAGATGCTGGGCCACTGCACCTTCGAGCCCGCCGAGCCCAAGGCCGCCAAGAACACCTACACCGCCGAGCGGTT |
| | | CATCTGGCTGACCAAGCTGAACAACCTGCGGATCCTGGAGCAGGGCTCCGAGCGGCCCCTGACCGACACCGAGCGGGCCACCC |
| | | TGATGGACGAGCCCTACCGGAAGTCCAAGCTGACCTACGCCCAGGCCCGGAAGCTGCTGGGCCTGGAGGACACCGCCTTCTTC |
| | | AAGGGCCTGCGGTACGGCAAGGACAACGCCGAGGCCTCCACCCTGATGGAGATGAAGGCCTACCACGCCATCTCCCGGGCCCT |
| | | GGAGAAGGAGGGCCTGAAGGACAAGAAGTCCCCCCTGAACCTGTCCTCCGAGCTGCAGGACGAGATCGGCACCGCCTTCTCCC |
| | | TGTTCAAGACCGACGAGGACATCACCGGCCGGCTGAAGGACCGGGTGCAGCCCGAGATCCTGGAGGCCCTGCTGAAGCACATC |
| | | TCCTTCGACAAGTTCGTGCAGATCTCCCTGAAGGCCCTGCGGCGGATCGTGCCCCTGATGGAGCAGGGCAAGCGGTACGACGA |
| | | GGCCTGCGCCGAGATCTACGGCGACCACTACGGCAAGAAGAACACCGAGGAGAAGATCTACCTGCCCCCCATCCCCGCCGACG |
| | | AGATCCGGAACCCCGTGGTGCTGCGGGCCCTGTCCCAGGCCCGGAAGGTGATCAACGGCGTGGTGCGGCGGTACGGCTCCCCC |
| | | GCCCGGATCCACATCGAGACCGCCCGGGAGGTGGGCAAGTCCTTCAAGGACCGGAAGGAGATCGAGAAGCGGCAGGAGGAGAA |
| | | CCGGAAGGACCGGGAGAAGGCCGCCGCCAAGTTCCGGGAGTACTTCCCCAACTTCGTGGGCGAGCCCAAGTCCAAGGACATCC |
| | | TGAAGCTGCGGCTGTACGAGCAGCAGCACGGCAAGTGCCTGTACTCCGGCAAGGAGATCAACCTGGTGCGGCTGAACGAGAAG |
| | | GGCTACGTGGAGATCGACCACGCCCTGCCCTTCTCCCGGACCTGGGACGACTCCTTCAACAACAAGGTGCTGGTGCTGGGCTC |
| | | CGAGAACCAGAACAAGGGCAACCAGACCCCCTACGAGTACTTCAACGGCAAGGACAACTCCCGGGAGTGGCAGGAGTTCAAGG |
| | | CCCGGGTGGAGACCTCCCGGTTCCCCCGGTCCAAGAAGCAGCGGATCCTGCTGCAGAAGTTCGACGAGGACGGCTTCAAGGAG |
| | | TGCAACCTGAACGACACCCGGTACGTGAACCGGTTCCTGTGCCAGTTCGTGGCCGACCACATCCTGCTGACCGGCAAGGGCAA |
| | | GCGGCGGGTGTTCGCCTCCAACGGCCAGATCACCAACCTGCTGCGGGGCTTCTGGGGCCTGCGGAAGGTGCGGGCCGAGAACG |
| | | ACCGGCACCACGCCCTGGACGCCGTGGTGGTGGCCTGCTCCACCGTGGCCATGCAGCAGAAGATCACCCGGTTCGTGCGGTAC |
| | | AAGGAGATGAACGCCTTCGACGGCAAGACCATCGACAAGGAGACCGGCAAGGTGCTGCACCAGAAGACCCACTTCCCCCAGCC |
| | | CTGGGAGTTCTTCGCCCAGGAGGTGATGATCCGGGTGTTCGGCAAGCCCGACGGCAAGCCCGAGTTCGAGGAGGCCGACACCC |
| | | CCGAGAAGCTGCGGACCCTGCTGGCCGAGAAGCTGTCCTCCCGGCCCGAGGCCGTGCACGAGTACGTGACCCCCCTGTTCGTG |
| | | TCCCGGGCCCCCAACCGGAAGATGTCCGGCGCCCACAAGGACACCCTGCGGTCCGCCAAGCGGTTCGTGAAGCACAACGAGAA |
| | | GATCTCCGTGAAGCGGGTGTGGCTGACCGAGATCAAGCTGGCCGACCTGGAGAACATGGTGAACTACAAGAACGGCCGGGAGA |
| | | TCGAGCTGTACGAGGCCCTGAAGGCCCGGCTGGAGGCCTACGGCGGCAACGCCAAGCAGGCCTTCGACCCCAAGGACAACCCC |
| | | TTCTACAAGAAGGGCGGCCAGCTGGTGAAGGCCGTGCGGGTGGAGAAGACCCAGGAGTCCGGCGTGCTGCTGAACAAGAAGAA |
| | | CGCCTACACCATCGCCGACAACGGCGACATGGTGCGGGTGGACGTGTTCTGCAAGGTGGACAAGAAGGGCAAGAACCAGTACT |
| | | TCATCGTGCCCATCTACGCCTGGCAGGTGGCCGAGAACATCCTGCCCGACATCGACTGCAAGGGCTACCGGATCGACGACTCC |
| | | TACACCTTCTGCTTCTCCCTGCACAAGTACGACCTGATCGCCTTCCAGAAGGACGAGAAGTCCAAGGTGGAGTTCGCCTACTA |
| | | CATCAACTGCGACTCCTCCAACGGCCGGTTCTACCTGGCCTGGCACGACAAGGGCTCCAAGGAGCAGCAGTTCCGGATCTCCA |
| | | CCCAGAACCTGGTGCTGATCCAGAAGTACCAGGTGAACGAGCTGGGCAAGGAGATCCGGCCCTGCCGGCTGAAGAAGCGGCCC |
| | | CCCGTGCGGUGA |
| Exemplary | 254 | ATGGCAGCATTCAAACCAAACCCAATCAACTACATCCTAGGACTAGACATCGGAATCGCATCAGTAGGATGAGCAATGGTAGA |
| open | | AATCGACGAAGAAGAAAACCCAATCCGACTAATCGACCTAGGAGTACGAGTATTCGAACGAGCAGAAGTACCAAAAACAGGAG |
| reading | | ACTCACTAGCAATGGCACGACGACTAGCACGATCAGTACGACGACTAACACGACGACGAGCACACCGACTACTACGAGCACGA |
| frame for | | CGACTACTAAAACGAGAAGGAGTACTACAAGCAGCAGACTTCGACGAAAACGGACTAATCAAATCACTACCAAACACACCATG |
| Nme2Cas9 | | ACAACTACGAGCAGCAGCACTAGACCGAAAACTAACACCACTAGAATGATCAGCAGTACTACTACACCTAATCAAACACCGAG |
| cleavase | | GATACCTATCACAACGAAAAAACGAAGGAGAAACAGCAGACAAAGAACTAGGAGCACTACTAAAAGGAGTAGCAAACAACGCA |
| | | CACGCACTACAAACAGGAGACTTCCGAACACCAGCAGAACTAGCACTAAACAAATTCGAAAAAGAATCAGGACACATCCGAAA |
| | | CCAACGAGGAGACTACTCACACACATTCTCACGAAAAGACCTACAAGCAGAACTAATCCTACTATTCGAAAAACAAAAAGAAT |
| | | TCGGAAACCCACACGTATCAGGAGGACTAAAAGAAGGAATCGAAACACTACTAATGACACAACGACCAGCACTATCAGGAGAC |
| | | GCAGTACAAAAAATGCTAGGACACTGCACATTCGAACCAGCAGAACCAAAAGCAGCAAAAAACACATACACAGCAGAACGATT |
| | | CATCTGACTAACAAAACTAAACAACCTACGAATCCTAGAACAAGGATCAGAACGACCACTAACAGACACAGAACGAGCAACAC |
| | | TAATGGACGAACCATACCGAAAATCAAAACTAACATACGCACAAGCACGAAAACTACTAGGACTAGAAGACACAGCATTCTTC |
| | | AAAGGACTACGATACGGAAAAGACAACGCAGAAGCATCAACACTAATGGAAATGAAAGCATACCACGCAATCTCACGAGCACT |
| | | AGAAAAAGAAGGACTAAAAGACAAAAAATCACCACTAAACCTATCATCAGAACTACAAGACGAAATCGGAACAGCATTCTCAC |
| | | TATTCAAAACAGACGAAGACATCACAGGACGACTAAAAGACCGAGTACAACCAGAAATCCTAGAAGCACTACTAAAACACATC |
| | | TCATTCGACAAATTCGTACAAATCTCACTAAAAGCACTACGACGAATCGTACCACTAATGGAACAAGGAAAACGATACGACGA |
| | | AGCATGCGCAGAAATCTACGGAGACCACTACGGAAAAAAAAACACAGAAGAAAAAATCTACCTACCACCAATCCCAGCAGACG |
| | | AAATCCGAAACCCAGTAGTACTACGAGCACTATCACAAGCACGAAAAGTAATCAACGGAGTAGTACGACGATACGGATCACCA |
| | | GCACGAATCCACATCGAAACAGCACGAGAAGTAGGAAAATCATTCAAAGACCGAAAAGAAATCGAAAAACGACAAGAAGAAAA |
| | | CCGAAAAGACCGAGAAAAAGCAGCAGCAAAATTCCGAGAATACTTCCCAAACTTCGTAGGAGAACCAAAATCAAAAGACATCC |
| | | TAAAACTACGACTATACGAACAACAACACGGAAAATGCCTATACTCAGGAAAAGAAATCAACCTAGTACGACTAAACGAAAAA |
| | | GGATACGTAGAAATCGACCACGCACTACCATTCTCACGAACATGAGACGACTCATTCAACAACAAAGTACTAGTACTAGGATC |
| | | AGAAAACCAAAACAAAGGAAACCAAACACCATACGAATACTTCAACGGAAAAGACAACTCACGAGAATGACAAGAATTCAAAG |
| | | CACGAGTAGAAACATCACGATTCCCACGATCAAAAAAACAACGAATCCTACTACAAAAATTCGACGAAGACGGATTCAAAGAA |
| | | TGCAACCTAAACGACACACGATACGTAAACCGATTCCTATGCCAATTCGTAGCAGACCACATCCTACTAACAGGAAAAGGAAA |
| | | ACGACGAGTATTCGCATCAAACGGACAAATCACAAACCTACTACGAGGATTCTGAGGACTACGAAAAGTACGAGCAGAAAACG |
| | | ACCGACACCACGCACTAGACGCAGTAGTAGTAGCATGCTCAACAGTAGCAATGCAACAAAAAATCACACGATTCGTACGATAC |
| | | AAAGAAATGAACGCATTCGACGGAAAAACAATCGACAAAGAAACAGGAAAAGTACTACACCAAAAAACACACTTCCCACAACC |
| | | ATGAGAATTCTTCGCACAAGAAGTAATGATCCGAGTATTCGGAAAACCAGACGGAAAACCAGAATTCGAAGAAGCAGACACAC |
| | | CAGAAAAACTACGAACACTACTAGCAGAAAAACTATCATCACGACCAGAAGCAGTACACGAATACGTAACACCACTATTCGTA |
| | | TCACGAGCACCAAACCGAAAAATGTCAGGAGCACACAAAGACACACTACGATCAGCAAAACGATTCGTAAAACACAACGAAAA |
| | | AATCTCAGTAAAACGAGTATGACTAACAGAAATCAAACTAGCAGACCTAGAAAACATGGTAAACTACAAAAACGGACGAGAAA |
| | | TCGAACTATACGAAGCACTAAAAGCACGACTAGAAGCATACGGAGGAAACGCAAAACAAGCATTCGACCCAAAAGACAACCCA |
| | | TTCTACAAAAAAGGAGGACAACTAGTAAAAGCAGTACGAGTAGAAAAAACACAAGAATCAGGAGTACTACTAAACAAAAAAAA |
| | | CGCATACACAATCGCAGACAACGGAGACATGGTACGAGTAGACGTATTCTGCAAAGTAGACAAAAAAGGAAAAAACCAATACT |
| | | TCATCGTACCAATCTACGCATGACAAGTAGCAGAAAACATCCTACCAGACATCGACTGCAAAGGATACCGAATCGACGACTCA |
| | | TACACATTCTGCTTCTCACTACACAAATACGACCTAATCGCATTCCAAAAAGACGAAAAATCAAAAGTAGAATTCGCATACTA |
| | | CATCAACTGCGACTCATCAAACGGACGATTCTACCTAGCATGACACGACAAAGGATCAAAAGAACAACAATTCCGAATCTCAA |
| | | CACAAAACCTAGTACTAATCCAAAAATACCAAGTAAACGAACTAGGAAAAGAAATCCGACCATGCCGACTAAAAAAACGACCA |
| | | CCAGTACGAUAA |
| Exemplary | 255 | MAAFKPNPINYILGLAIGIASVGWAMVEIDEEENPIRLIDLGVRVFERAEVPKTGDSLAMARRLARSVRRLTRRRAHRLLRAR |
| amino | | RLLKREGVLQAADEDENGLIKSLPNTPWQLRAAALDRKLTPLEWSAVLLHLIKHRGYLSQRKNEGETADKELGALLKGVANNA |
| acid | | HALQTGDFRTPAELALNKFEKESGHIRNQRGDYSHTFSRKDLQAELILLFEKQKEFGNPHVSGGLKEGIETLLMTQRPALSGD |
| sequence | | AVQKMLGHCTFEPAEPKAAKNTYTAERFIWLTKLNNLRILEQGSERPLTDTERATLMDEPYRKSKLTYAQARKLLGLEDTAFF |
| of | | KGLRYGKDNAEASTLMEMKAYHAISRALEKEGLKDKKSPLNLSSELQDEIGTAFSLEKTDEDITGRLKDRVQPEILEALLKHI |
| Nme2Cas9 | | SFDKFVQISLKALRRIVPLMEQGKRYDEACAEIYGDHYGKKNTEEKIYLPPIPADEIRNPVVLRALSQARKVINGVVRRYGSP |
| dCas9 | | ARIHIETAREVGKSFKDRKEIEKRQEENRKDREKAAAKFREYFPNFVGEPKSKDILKLRLYEQQHGKCLYSGKEINLVRLNEK |
| | | GYVEIDAALPESRTWDDSFNNKVLVLGSENQNKGNQTPYEYENGKDNSREWQEFKARVETSRFPRSKKQRILLQKFDEDGEKE |
| | | CNLNDTRYVNRFLCQFVADHILLTGKGKRRVFASNGQITNLLRGFWGLRKVRAENDRHHALDAVVVACSTVAMQQKITRFVRY |
| | | KEMNAFDGKTIDKETGKVLHQKTHFPQPWEFFAQEVMIRVFGKPDGKPEFEEADTPEKLRTLLAEKLSSRPEAVHEYVTPLFV |
| | | SRAPNRKMSGAHKDTLRSAKRFVKHNEKISVKRVWLTEIKLADLENMVNYKNGREIELYEALKARLEAYGGNAKQAFDPKDNP |
| | | FYKKGGQLVKAVRVEKTQESGVLLNKKNAYTIADNGDMVRVDVFCKVDKKGKNQYFIVPIYAWQVAENILPDIDCKGYRIDDS |
| | | YTFCFSLHKYDLIAFQKDEKSKVEFAYYINCDSSNGRFYLAWHDKGSKEQQFRISTQNLVLIQKYQVNELGKEIRPCRLKKRP |
| | | PVR |
| Exemplary | 256 | GCTGCTTTTAAGCCTAATCCTATTAATTATATTCTTGGTCTTGCTATTGGTATTGCTTCTGTTGGTTGGGCTATGGTTGAGAT |
| coding | | TGATGAGGAGGAGAATCCTATTCGTCTTATTGATCTTGGTGTTCGTGTTTTTGAGCGTGCTGAGGTTCCTAAGACTGGTGATT |
| sequence | | CTCTTGCTATGGCTCGTCGTCTTGCTCGTTCTGTTCGTCGTCTTACTCGTCGTCGTGCTCATCGTCTTCTTCGTGCTCGTCGT |
| encoding | | CTTCTTAAGCGTGAGGGTGTTCTTCAGGCTGCTGATTTTGATGAGAATGGTCTTATTAAGTCTCTTCCTAATACTCCTTGGCA |
| Nme2Cas9 | | GCTTCGTGCTGCTGCTCTTGATCGTAAGCTTACTCCTCTTGAGTGGTCTGCTGTTCTTCTTCATCTTATTAAGCATCGTGGTT |
| dCas9 | | ATCTTTCTCAGCGTAAGAATGAGGGTGAGACTGCTGATAAGGAGCTTGGTGCTCTTCTTAAGGGTGTTGCTAATAATGCTCAT |
| | | GCTCTTCAGACTGGTGATTTTCGTACTCCTGCTGAGCTTGCTCTTAATAAGTTTGAGAAGGAGTCTGGTCATATTCGTAATCA |
| | | GCGTGGTGATTATTCTCATACTTTTTCTCGTAAGGATCTTCAGGCTGAGCTTATTCTTCTTTTTGAGAAGCAGAAGGAGTTTG |
| | | GTAATCCTCATGTTTCTGGTGGTCTTAAGGAGGGTATTGAGACTCTTCTTATGACTCAGCGTCCTGCTCTTTCTGGTGATGCT |
| | | GTTCAGAAGATGCTTGGTCATTGTACTTTTGAGCCTGCTGAGCCTAAGGCTGCTAAGAATACTTATACTGCTGAGCGTTTTAT |
| | | TTGGCTTACTAAGCTTAATAATCTTCGTATTCTTGAGCAGGGTTCTGAGCGTCCTCTTACTGATACTGAGCGTGCTACTCTTA |
| | | TGGATGAGCCTTATCGTAAGTCTAAGCTTACTTATGCTCAGGCTCGTAAGCTTCTTGGTCTTGAGGATACTGCTTTTTTTAAG |
| | | GGTCTTCGTTATGGTAAGGATAATGCTGAGGCTTCTACTCTTATGGAGATGAAGGCTTATCATGCTATTTCTCGTGCTCTTGA |
| | | GAAGGAGGGTCTTAAGGATAAGAAGTCTCCTCTTAATCTTTCTTCTGAGCTTCAGGATGAGATTGGTACTGCTTTTTCTCTTT |
| | | TTAAGACTGATGAGGATATTACTGGTCGTCTTAAGGATCGTGTTCAGCCTGAGATTCTTGAGGCTCTTCTTAAGCATATTTCT |
| | | TTTGATAAGTTTGTTCAGATTTCTCTTAAGGCTCTTCGTCGTATTGTTCCTCTTATGGAGCAGGGTAAGCGTTATGATGAGGC |
| | | TTGTGCTGAGATTTATGGTGATCATTATGGTAAGAAGAATACTGAGGAGAAGATTTATCTTCCTCCTATTCCTGCTGATGAGA |
| | | TTCGTAATCCTGTTGTTCTTCGTGCTCTTTCTCAGGCTCGTAAGGTTATTAATGGTGTTGTTCGTCGTTATGGTTCTCCTGCT |
| | | CGTATTCATATTGAGACTGCTCGTGAGGTTGGTAAGTCTTTTAAGGATCGTAAGGAGATTGAGAAGCGTCAGGAGGAGAATCG |
| | | TAAGGATCGTGAGAAGGCTGCTGCTAAGTTTCGTGAGTATTTTCCTAATTTTGTTGGTGAGCCTAAGTCTAAGGATATTCTTA |
| | | AGCTTCGTCTTTATGAGCAGCAGCATGGTAAGTGTCTTTATTCTGGTAAGGAGATTAATCTTGTTCGTCTTAATGAGAAGGGT |
| | | TATGTTGAGATTGATGCTGCTCTTCCTTTTTCTCGTACTTGGGATGATTCTTTTAATAATAAGGTTCTTGTTCTTGGTTCTGA |
| | | GAATCAGAATAAGGGTAATCAGACTCCTTATGAGTATTTTAATGGTAAGGATAATTCTCGTGAGTGGCAGGAGTTTAAGGCTC |
| | | GTGTTGAGACTTCTCGTTTTCCTCGTTCTAAGAAGCAGCGTATTCTTCTTCAGAAGTTTGATGAGGATGGTTTTAAGGAGTGT |
| | | AATCTTAATGATACTCGTTATGTTAATCGTTTTCTTTGTCAGTTTGTTGCTGATCATATTCTTCTTACTGGTAAGGGTAAGCG |
| | | TCGTGTTTTTGCTTCTAATGGTCAGATTACTAATCTTCTTCGTGGTTTTTGGGGTCTTCGTAAGGTTCGTGCTGAGAATGATC |
| | | GTCATCATGCTCTTGATGCTGTTGTTGTTGCTTGTTCTACTGTTGCTATGCAGCAGAAGATTACTCGTTTTGTTCGTTATAAG |
| | | GAGATGAATGCTTTTGATGGTAAGACTATTGATAAGGAGACTGGTAAGGTTCTTCATCAGAAGACTCATTTTCCTCAGCCTTG |
| | | GGAGTTTTTTGCTCAGGAGGTTATGATTCGTGTTTTTGGTAAGCCTGATGGTAAGCCTGAGTTTGAGGAGGCTGATACTCCTG |
| | | AGAAGCTTCGTACTCTTCTTGCTGAGAAGCTTTCTTCTCGTCCTGAGGCTGTTCATGAGTATGTTACTCCTCTTTTTGTTTCT |
| | | CGTGCTCCTAATCGTAAGATGTCTGGTGCTCATAAGGATACTCTTCGTTCTGCTAAGCGTTTTGTTAAGCATAATGAGAAGAT |
| | | TTCTGTTAAGCGTGTTTGGCTTACTGAGATTAAGCTTGCTGATCTTGAGAATATGGTTAATTATAAGAATGGTCGTGAGATTG |
| | | AGCTTTATGAGGCTCTTAAGGCTCGTCTTGAGGCTTATGGTGGTAATGCTAAGCAGGCTTTTGATCCTAAGGATAATCCTTTT |
| | | TATAAGAAGGGTGGTCAGCTTGTTAAGGCTGTTCGTGTTGAGAAGACTCAGGAGTCTGGTGTTCTTCTTAATAAGAAGAATGC |
| | | TTATACTATTGCTGATAATGGTGATATGGTTCGTGTTGATGTTTTTTGTAAGGTTGATAAGAAGGGTAAGAATCAGTATTTTA |
| | | TTGTTCCTATTTATGCTTGGCAGGTTGCTGAGAATATTCTTCCTGATATTGATTGTAAGGGTTATCGTATTGATGATTCTTAT |
| | | ACTTTTTGTTTTTCTCTTCATAAGTATGATCTTATTGCTTTTCAGAAGGATGAGAAGTCTAAGGTTGAGTTTGCTTATTATAT |
| | | TAATTGTGATTCTTCTAATGGTCGTTTTTATCTTGCTTGGCATGATAAGGGTTCTAAGGAGCAGCAGTTTCGTATTTCTACTC |
| | | AGAATCTTGTTCTTATTCAGAAGTATCAGGTTAATGAGCTTGGTAAGGAGATTCGTCCTTGTCGTCTTAAGAAGCGTCCTCCT |
| | | GTTCGT |
| Exemplary | 257 | GCCGCCTTCAAGCCCAACCCCATCAACTACATCCTGGGCCTGGCCATCGGCATCGCCTCCGTGGGCTGGGCCATGGTGGAGAT |
| coding | | CGACGAGGAGGAGAACCCCATCCGGCTGATCGACCTGGGCGTGCGGGTGTTCGAGCGGGCCGAGGTGCCCAAGACCGGCGACT |
| sequence | | CCCTGGCCATGGCCCGGCGGCTGGCCCGGTCCGTGCGGCGGCTGACCCGGCGGCGGGCCCACCGGCTGCTGCGGGCCCGGCGG |
| encoding | | CTGCTGAAGCGGGAGGGCGTGCTGCAGGCCGCCGACTTCGACGAGAACGGCCTGATCAAGTCCCTGCCCAACACCCCCTGGCA |
| Nme2Cas9 | | GCTGCGGGCCGCCGCCCTGGACCGGAAGCTGACCCCCCTGGAGTGGTCCGCCGTGCTGCTGCACCTGATCAAGCACCGGGGCT |
| dCas9 | | ACCTGTCCCAGCGGAAGAACGAGGGCGAGACCGCCGACAAGGAGCTGGGCGCCCTGCTGAAGGGCGTGGCCAACAACGCCCAC |
| | | GCCCTGCAGACCGGCGACTTCCGGACCCCCGCCGAGCTGGCCCTGAACAAGTTCGAGAAGGAGTCCGGCCACATCCGGAACCA |
| | | GCGGGGCGACTACTCCCACACCTTCTCCCGGAAGGACCTGCAGGCCGAGCTGATCCTGCTGTTCGAGAAGCAGAAGGAGTTCG |
| | | GCAACCCCCACGTGTCCGGCGGCCTGAAGGAGGGCATCGAGACCCTGCTGATGACCCAGCGGCCCGCCCTGTCCGGCGACGCC |
| | | GTGCAGAAGATGCTGGGCCACTGCACCTTCGAGCCCGCCGAGCCCAAGGCCGCCAAGAACACCTACACCGCCGAGCGGTTCAT |
| | | CTGGCTGACCAAGCTGAACAACCTGCGGATCCTGGAGCAGGGCTCCGAGCGGCCCCTGACCGACACCGAGCGGGCCACCCTGA |
| | | TGGACGAGCCCTACCGGAAGTCCAAGCTGACCTACGCCCAGGCCCGGAAGCTGCTGGGCCTGGAGGACACCGCCTTCTTCAAG |
| | | GGCCTGCGGTACGGCAAGGACAACGCCGAGGCCTCCACCCTGATGGAGATGAAGGCCTACCACGCCATCTCCCGGGCCCTGGA |
| | | GAAGGAGGGCCTGAAGGACAAGAAGTCCCCCCTGAACCTGTCCTCCGAGCTGCAGGACGAGATCGGCACCGCCTTCTCCCTGT |
| | | TCAAGACCGACGAGGACATCACCGGCCGGCTGAAGGACCGGGTGCAGCCCGAGATCCTGGAGGCCCTGCTGAAGCACATCTCC |
| | | TTCGACAAGTTCGTGCAGATCTCCCTGAAGGCCCTGCGGCGGATCGTGCCCCTGATGGAGCAGGGCAAGCGGTACGACGAGGC |
| | | CTGCGCCGAGATCTACGGCGACCACTACGGCAAGAAGAACACCGAGGAGAAGATCTACCTGCCCCCCATCCCCGCCGACGAGA |
| | | TCCGGAACCCCGTGGTGCTGCGGGCCCTGTCCCAGGCCCGGAAGGTGATCAACGGCGTGGTGCGGCGGTACGGCTCCCCCGCC |
| | | CGGATCCACATCGAGACCGCCCGGGAGGTGGGCAAGTCCTTCAAGGACCGGAAGGAGATCGAGAAGCGGCAGGAGGAGAACCG |
| | | GAAGGACCGGGAGAAGGCCGCCGCCAAGTTCCGGGAGTACTTCCCCAACTTCGTGGGCGAGCCCAAGTCCAAGGACATCCTGA |
| | | AGCTGCGGCTGTACGAGCAGCAGCACGGCAAGTGCCTGTACTCCGGCAAGGAGATCAACCTGGTGCGGCTGAACGAGAAGGGC |
| | | TACGTGGAGATCGACGCCGCCCTGCCCTTCTCCCGGACCTGGGACGACTCCTTCAACAACAAGGTGCTGGTGCTGGGCTCCGA |
| | | GAACCAGAACAAGGGCAACCAGACCCCCTACGAGTACTTCAACGGCAAGGACAACTCCCGGGAGTGGCAGGAGTTCAAGGCCC |
| | | GGGTGGAGACCTCCCGGTTCCCCCGGTCCAAGAAGCAGCGGATCCTGCTGCAGAAGTTCGACGAGGACGGCTTCAAGGAGTGC |
| | | AACCTGAACGACACCCGGTACGTGAACCGGTTCCTGTGCCAGTTCGTGGCCGACCACATCCTGCTGACCGGCAAGGGCAAGCG |
| | | GCGGGTGTTCGCCTCCAACGGCCAGATCACCAACCTGCTGCGGGGCTTCTGGGGCCTGCGGAAGGTGCGGGCCGAGAACGACC |
| | | GGCACCACGCCCTGGACGCCGTGGTGGTGGCCTGCTCCACCGTGGCCATGCAGCAGAAGATCACCCGGTTCGTGCGGTACAAG |
| | | GAGATGAACGCCTTCGACGGCAAGACCATCGACAAGGAGACCGGCAAGGTGCTGCACCAGAAGACCCACTTCCCCCAGCCCTG |
| | | GGAGTTCTTCGCCCAGGAGGTGATGATCCGGGTGTTCGGCAAGCCCGACGGCAAGCCCGAGTTCGAGGAGGCCGACACCCCCG |
| | | AGAAGCTGCGGACCCTGCTGGCCGAGAAGCTGTCCTCCCGGCCCGAGGCCGTGCACGAGTACGTGACCCCCCTGTTCGTGTCC |
| | | CGGGCCCCCAACCGGAAGATGTCCGGCGCCCACAAGGACACCCTGCGGTCCGCCAAGCGGTTCGTGAAGCACAACGAGAAGAT |
| | | CTCCGTGAAGCGGGTGTGGCTGACCGAGATCAAGCTGGCCGACCTGGAGAACATGGTGAACTACAAGAACGGCCGGGAGATCG |
| | | AGCTGTACGAGGCCCTGAAGGCCCGGCTGGAGGCCTACGGCGGCAACGCCAAGCAGGCCTTCGACCCCAAGGACAACCCCTTC |
| | | TACAAGAAGGGCGGCCAGCTGGTGAAGGCCGTGCGGGTGGAGAAGACCCAGGAGTCCGGCGTGCTGCTGAACAAGAAGAACGC |
| | | CTACACCATCGCCGACAACGGCGACATGGTGCGGGTGGACGTGTTCTGCAAGGTGGACAAGAAGGGCAAGAACCAGTACTTCA |
| | | TCGTGCCCATCTACGCCTGGCAGGTGGCCGAGAACATCCTGCCCGACATCGACTGCAAGGGCTACCGGATCGACGACTCCTAC |
| | | ACCTTCTGCTTCTCCCTGCACAAGTACGACCTGATCGCCTTCCAGAAGGACGAGAAGTCCAAGGTGGAGTTCGCCTACTACAT |
| | | CAACTGCGACTCCTCCAACGGCCGGTTCTACCTGGCCTGGCACGACAAGGGCTCCAAGGAGCAGCAGTTCCGGATCTCCACCC |
| | | AGAACCTGGTGCTGATCCAGAAGTACCAGGTGAACGAGCTGGGCAAGGAGATCCGGCCCTGCCGGCTGAAGAAGCGGCCCCCC |
| | | GTGCGG |
| Exemplary | 258 | GCCGCCTTCAAGCCCAACCCCATCAACTACATCCTGGGCCTGGCCATCGGCATCGCCTCCGTGGGCTGGGCCATGGTGGAGAT |
| coding | | CGACGAGGAGGAGAACCCCATCCGGCTGATCGACCTGGGCGTGCGGGTGTTCGAGCGGGCCGAGGTGCCCAAGACCGGCGACT |
| sequence | | CCCTGGCCATGGCCCGGCGGCTGGCCCGGTCCGTGCGGCGGCTGACCCGGCGGCGGGCCCACCGGCTGCTGCGGGCCCGGCGG |
| encoding | | CTGCTGAAGCGGGAGGGCGTGCTGCAGGCCGCCGACTTCGACGAGAACGGCCTGATCAAGTCCCTGCCCAACACCCCCTGGCA |
| Nme2Cas9 | | GCTGCGGGCCGCCGCCCTGGACCGGAAGCTGACCCCCCTGGAGTGGTCCGCCGTGCTGCTGCACCTGATCAAGCACCGGGGCT |
| dCas9 | | ACCTGTCCCAGCGGAAGAACGAGGGCGAGACCGCCGACAAGGAGCTGGGCGCCCTGCTGAAGGGCGTGGCCAACAACGCCCAC |
| | | GCCCTGCAGACCGGCGACTTCCGGACCCCCGCCGAGCTGGCCCTGAACAAGTTCGAGAAGGAGTCCGGCCACATCCGGAACCA |
| | | GCGGGGCGACTACTCCCACACCTTCTCCCGGAAGGACCTGCAGGCCGAGCTGATCCTGCTGTTCGAGAAGCAGAAGGAGTTCG |
| | | GCAACCCCCACGTGTCCGGCGGCCTGAAGGAGGGCATCGAGACCCTGCTGATGACCCAGCGGCCCGCCCTGTCCGGCGACGCC |
| | | GTGCAGAAGATGCTGGGCCACTGCACCTTCGAGCCCGCCGAGCCCAAGGCCGCCAAGAACACCTACACCGCCGAGCGGTTCAT |
| | | CTGGCTGACCAAGCTGAACAACCTGCGGATCCTGGAGCAGGGCTCCGAGCGGCCCCTGACCGACACCGAGCGGGCCACCCTGA |
| | | TGGACGAGCCCTACCGGAAGTCCAAGCTGACCTACGCCCAGGCCCGGAAGCTGCTGGGCCTGGAGGACACCGCCTTCTTCAAG |
| | | GGCCTGCGGTACGGCAAGGACAACGCCGAGGCCTCCACCCTGATGGAGATGAAGGCCTACCACGCCATCTCCCGGGCCCTGGA |
| | | GAAGGAGGGCCTGAAGGACAAGAAGTCCCCCCTGAACCTGTCCTCCGAGCTGCAGGACGAGATCGGCACCGCCTTCTCCCTGT |
| | | TCAAGACCGACGAGGACATCACCGGCCGGCTGAAGGACCGGGTGCAGCCCGAGATCCTGGAGGCCCTGCTGAAGCACATCTCC |
| | | TTCGACAAGTTCGTGCAGATCTCCCTGAAGGCCCTGCGGCGGATCGTGCCCCTGATGGAGCAGGGCAAGCGGTACGACGAGGC |
| | | CTGCGCCGAGATCTACGGCGACCACTACGGCAAGAAGAACACCGAGGAGAAGATCTACCTGCCCCCCATCCCCGCCGACGAGA |
| | | TCCGGAACCCCGTGGTGCTGCGGGCCCTGTCCCAGGCCCGGAAGGTGATCAACGGCGTGGTGCGGCGGTACGGCTCCCCCGCC |
| | | CGGATCCACATCGAGACCGCCCGGGAGGTGGGCAAGTCCTTCAAGGACCGGAAGGAGATCGAGAAGCGGCAGGAGGAGAACCG |
| | | GAAGGACCGGGAGAAGGCCGCCGCCAAGTTCCGGGAGTACTTCCCCAACTTCGTGGGCGAGCCCAAGTCCAAGGACATCCTGA |
| | | AGCTGCGGCTGTACGAGCAGCAGCACGGCAAGTGCCTGTACTCCGGCAAGGAGATCAACCTGGTGCGGCTGAACGAGAAGGGC |
| | | TACGTGGAGATCGACGCCGCCCTGCCCTTCTCCCGGACCTGGGACGACTCCTTCAACAACAAGGTGCTGGTGCTGGGCTCCGA |
| | | GAACCAGAACAAGGGCAACCAGACCCCCTACGAGTACTTCAACGGCAAGGACAACTCCCGGGAGTGGCAGGAGTTCAAGGCCC |
| | | GGGTGGAGACCTCCCGGTTCCCCCGGTCCAAGAAGCAGCGGATCCTGCTGCAGAAGTTCGACGAGGACGGCTTCAAGGAGTGC |
| | | AACCTGAACGACACCCGGTACGTGAACCGGTTCCTGTGCCAGTTCGTGGCCGACCACATCCTGCTGACCGGCAAGGGCAAGCG |
| | | GCGGGTGTTCGCCTCCAACGGCCAGATCACCAACCTGCTGCGGGGCTTCTGGGGCCTGCGGAAGGTGCGGGCCGAGAACGACC |
| | | GGCACCACGCCCTGGACGCCGTGGTGGTGGCCTGCTCCACCGTGGCCATGCAGCAGAAGATCACCCGGTTCGTGCGGTACAAG |
| | | GAGATGAACGCCTTCGACGGCAAGACCATCGACAAGGAGACCGGCAAGGTGCTGCACCAGAAGACCCACTTCCCCCAGCCCTG |
| | | GGAGTTCTTCGCCCAGGAGGTGATGATCCGGGTGTTCGGCAAGCCCGACGGCAAGCCCGAGTTCGAGGAGGCCGACACCCCCG |
| | | AGAAGCTGCGGACCCTGCTGGCCGAGAAGCTGTCCTCCCGGCCCGAGGCCGTGCACGAGTACGTGACCCCCCTGTTCGTGTCC |
| | | CGGGCCCCCAACCGGAAGATGTCCGGCGCCCACAAGGACACCCTGCGGTCCGCCAAGCGGTTCGTGAAGCACAACGAGAAGAT |
| | | CTCCGTGAAGCGGGTGTGGCTGACCGAGATCAAGCTGGCCGACCTGGAGAACATGGTGAACTACAAGAACGGCCGGGAGATCG |
| | | AGCTGTACGAGGCCCTGAAGGCCCGGCTGGAGGCCTACGGCGGCAACGCCAAGCAGGCCTTCGACCCCAAGGACAACCCCTTC |
| | | TACAAGAAGGGCGGCCAGCTGGTGAAGGCCGTGCGGGTGGAGAAGACCCAGGAGTCCGGCGTGCTGCTGAACAAGAAGAACGC |
| | | CTACACCATCGCCGACAACGGCGACATGGTGCGGGTGGACGTGTTCTGCAAGGTGGACAAGAAGGGCAAGAACCAGTACTTCA |
| | | TCGTGCCCATCTACGCCTGGCAGGTGGCCGAGAACATCCTGCCCGACATCGACTGCAAGGGCTACCGGATCGACGACTCCTAC |
| | | ACCTTCTGCTTCTCCCTGCACAAGTACGACCTGATCGCCTTCCAGAAGGACGAGAAGTCCAAGGTGGAGTTCGCCTACTACAT |
| | | CAACTGCGACTCCTCCAACGGCCGGTTCTACCTGGCCTGGCACGACAAGGGCTCCAAGGAGCAGCAGTTCCGGATCTCCACCC |
| | | AGAACCTGGTGCTGATCCAGAAGTACCAGGTGAACGAGCTGGGCAAGGAGATCCGGCCCTGCCGGCTGAAGAAGCGGCCCCCC |
| | | GTGCGG |
| Exemplary | 259 | ATGGCTGCTTTTAAGCCTAATCCTATTAATTATATTCTTGGTCTTGCTATTGGTATTGCTTCTGTTGGTTGGGCTATGGTTGA |
| open | | GATTGATGAGGAGGAGAATCCTATTCGTCTTATTGATCTTGGTGTTCGTGTTTTTGAGCGTGCTGAGGTTCCTAAGACTGGTG |
| reading | | ATTCTCTTGCTATGGCTCGTCGTCTTGCTCGTTCTGTTCGTCGTCTTACTCGTCGTCGTGCTCATCGTCTTCTTCGTGCTCGT |
| frame for | | CGTCTTCTTAAGCGTGAGGGTGTTCTTCAGGCTGCTGATTTTGATGAGAATGGTCTTATTAAGTCTCTTCCTAATACTCCTTG |
| Nme2Cas9 | | GCAGCTTCGTGCTGCTGCTCTTGATCGTAAGCTTACTCCTCTTGAGTGGTCTGCTGTTCTTCTTCATCTTATTAAGCATCGTG |
| dCas9 | | GTTATCTTTCTCAGCGTAAGAATGAGGGTGAGACTGCTGATAAGGAGCTTGGTGCTCTTCTTAAGGGTGTTGCTAATAATGCT |
| | | CATGCTCTTCAGACTGGTGATTTTCGTACTCCTGCTGAGCTTGCTCTTAATAAGTTTGAGAAGGAGTCTGGTCATATTCGTAA |
| | | TCAGCGTGGTGATTATTCTCATACTTTTTCTCGTAAGGATCTTCAGGCTGAGCTTATTCTTCTTTTTGAGAAGCAGAAGGAGT |
| | | TTGGTAATCCTCATGTTTCTGGTGGTCTTAAGGAGGGTATTGAGACTCTTCTTATGACTCAGCGTCCTGCTCTTTCTGGTGAT |
| | | GCTGTTCAGAAGATGCTTGGTCATTGTACTTTTGAGCCTGCTGAGCCTAAGGCTGCTAAGAATACTTATACTGCTGAGCGTTT |
| | | TATTTGGCTTACTAAGCTTAATAATCTTCGTATTCTTGAGCAGGGTTCTGAGCGTCCTCTTACTGATACTGAGCGTGCTACTC |
| | | TTATGGATGAGCCTTATCGTAAGTCTAAGCTTACTTATGCTCAGGCTCGTAAGCTTCTTGGTCTTGAGGATACTGCTTTTTTT |
| | | AAGGGTCTTCGTTATGGTAAGGATAATGCTGAGGCTTCTACTCTTATGGAGATGAAGGCTTATCATGCTATTTCTCGTGCTCT |
| | | TGAGAAGGAGGGTCTTAAGGATAAGAAGTCTCCTCTTAATCTTTCTTCTGAGCTTCAGGATGAGATTGGTACTGCTTTTTCTC |
| | | TTTTTAAGACTGATGAGGATATTACTGGTCGTCTTAAGGATCGTGTTCAGCCTGAGATTCTTGAGGCTCTTCTTAAGCATATT |
| | | TCTTTTGATAAGTTTGTTCAGATTTCTCTTAAGGCTCTTCGTCGTATTGTTCCTCTTATGGAGCAGGGTAAGCGTTATGATGA |
| | | GGCTTGTGCTGAGATTTATGGTGATCATTATGGTAAGAAGAATACTGAGGAGAAGATTTATCTTCCTCCTATTCCTGCTGATG |
| | | AGATTCGTAATCCTGTTGTTCTTCGTGCTCTTTCTCAGGCTCGTAAGGTTATTAATGGTGTTGTTCGTCGTTATGGTTCTCCT |
| | | GCTCGTATTCATATTGAGACTGCTCGTGAGGTTGGTAAGTCTTTTAAGGATCGTAAGGAGATTGAGAAGCGTCAGGAGGAGAA |
| | | TCGTAAGGATCGTGAGAAGGCTGCTGCTAAGTTTCGTGAGTATTTTCCTAATTTTGTTGGTGAGCCTAAGTCTAAGGATATTC |
| | | TTAAGCTTCGTCTTTATGAGCAGCAGCATGGTAAGTGTCTTTATTCTGGTAAGGAGATTAATCTTGTTCGTCTTAATGAGAAG |
| | | GGTTATGTTGAGATTGATGCTGCTCTTCCTTTTTCTCGTACTTGGGATGATTCTTTTAATAATAAGGTTCTTGTTCTTGGTTC |
| | | TGAGAATCAGAATAAGGGTAATCAGACTCCTTATGAGTATTTTAATGGTAAGGATAATTCTCGTGAGTGGCAGGAGTTTAAGG |
| | | CTCGTGTTGAGACTTCTCGTTTTCCTCGTTCTAAGAAGCAGCGTATTCTTCTTCAGAAGTTTGATGAGGATGGTTTTAAGGAG |
| | | TGTAATCTTAATGATACTCGTTATGTTAATCGTTTTCTTTGTCAGTTTGTTGCTGATCATATTCTTCTTACTGGTAAGGGTAA |
| | | GCGTCGTGTTTTTGCTTCTAATGGTCAGATTACTAATCTTCTTCGTGGTTTTTGGGGTCTTCGTAAGGTTCGTGCTGAGAATG |
| | | ATCGTCATCATGCTCTTGATGCTGTTGTTGTTGCTTGTTCTACTGTTGCTATGCAGCAGAAGATTACTCGTTTTGTTCGTTAT |
| | | AAGGAGATGAATGCTTTTGATGGTAAGACTATTGATAAGGAGACTGGTAAGGTTCTTCATCAGAAGACTCATTTTCCTCAGCC |
| | | TTGGGAGTTTTTTGCTCAGGAGGTTATGATTCGTGTTTTTGGTAAGCCTGATGGTAAGCCTGAGTTTGAGGAGGCTGATACTC |
| | | CTGAGAAGCTTCGTACTCTTCTTGCTGAGAAGCTTTCTTCTCGTCCTGAGGCTGTTCATGAGTATGTTACTCCTCTTTTTGTT |
| | | TCTCGTGCTCCTAATCGTAAGATGTCTGGTGCTCATAAGGATACTCTTCGTTCTGCTAAGCGTTTTGTTAAGCATAATGAGAA |
| | | GATTTCTGTTAAGCGTGTTTGGCTTACTGAGATTAAGCTTGCTGATCTTGAGAATATGGTTAATTATAAGAATGGTCGTGAGA |
| | | TTGAGCTTTATGAGGCTCTTAAGGCTCGTCTTGAGGCTTATGGTGGTAATGCTAAGCAGGCTTTTGATCCTAAGGATAATCCT |
| | | TTTTATAAGAAGGGTGGTCAGCTTGTTAAGGCTGTTCGTGTTGAGAAGACTCAGGAGTCTGGTGTTCTTCTTAATAAGAAGAA |
| | | TGCTTATACTATTGCTGATAATGGTGATATGGTTCGTGTTGATGTTTTTTGTAAGGTTGATAAGAAGGGTAAGAATCAGTATT |
| | | TTATTGTTCCTATTTATGCTTGGCAGGTTGCTGAGAATATTCTTCCTGATATTGATTGTAAGGGTTATCGTATTGATGATTCT |
| | | TATACTTTTTGTTTTTCTCTTCATAAGTATGATCTTATTGCTTTTCAGAAGGATGAGAAGTCTAAGGTTGAGTTTGCTTATTA |
| | | TATTAATTGTGATTCTTCTAATGGTCGTTTTTATCTTGCTTGGCATGATAAGGGTTCTAAGGAGCAGCAGTTTCGTATTTCTA |
| | | CTCAGAATCTTGTTCTTATTCAGAAGTATCAGGTTAATGAGCTTGGTAAGGAGATTCGTCCTTGTCGTCTTAAGAAGCGTCCT |
| | | CCTGTTCGTUGA |
| Exemplary | 260 | ATGGCCGCCTTCAAGCCCAACCCCATCAACTACATCCTGGGCCTGGCCATCGGCATCGCCTCCGTGGGCTGGGCCATGGTGGA |
| open | | GATCGACGAGGAGGAGAACCCCATCCGGCTGATCGACCTGGGCGTGCGGGTGTTCGAGCGGGCCGAGGTGCCCAAGACCGGCG |
| reading | | ACTCCCTGGCCATGGCCCGGCGGCTGGCCCGGTCCGTGCGGCGGCTGACCCGGCGGCGGGCCCACCGGCTGCTGCGGGCCCGG |
| frame for | | CGGCTGCTGAAGCGGGAGGGCGTGCTGCAGGCCGCCGACTTCGACGAGAACGGCCTGATCAAGTCCCTGCCCAACACCCCCTG |
| Nme2Cas9 | | GCAGCTGCGGGCCGCCGCCCTGGACCGGAAGCTGACCCCCCTGGAGTGGTCCGCCGTGCTGCTGCACCTGATCAAGCACCGGG |
| dCas9 | | GCTACCTGTCCCAGCGGAAGAACGAGGGCGAGACCGCCGACAAGGAGCTGGGCGCCCTGCTGAAGGGCGTGGCCAACAACGCC |
| | | CACGCCCTGCAGACCGGCGACTTCCGGACCCCCGCCGAGCTGGCCCTGAACAAGTTCGAGAAGGAGTCCGGCCACATCCGGAA |
| | | CCAGCGGGGCGACTACTCCCACACCTTCTCCCGGAAGGACCTGCAGGCCGAGCTGATCCTGCTGTTCGAGAAGCAGAAGGAGT |
| | | TCGGCAACCCCCACGTGTCCGGCGGCCTGAAGGAGGGCATCGAGACCCTGCTGATGACCCAGCGGCCCGCCCTGTCCGGCGAC |
| | | GCCGTGCAGAAGATGCTGGGCCACTGCACCTTCGAGCCCGCCGAGCCCAAGGCCGCCAAGAACACCTACACCGCCGAGCGGTT |
| | | CATCTGGCTGACCAAGCTGAACAACCTGCGGATCCTGGAGCAGGGCTCCGAGCGGCCCCTGACCGACACCGAGCGGGCCACCC |
| | | TGATGGACGAGCCCTACCGGAAGTCCAAGCTGACCTACGCCCAGGCCCGGAAGCTGCTGGGCCTGGAGGACACCGCCTTCTTC |
| | | AAGGGCCTGCGGTACGGCAAGGACAACGCCGAGGCCTCCACCCTGATGGAGATGAAGGCCTACCACGCCATCTCCCGGGCCCT |
| | | GGAGAAGGAGGGCCTGAAGGACAAGAAGTCCCCCCTGAACCTGTCCTCCGAGCTGCAGGACGAGATCGGCACCGCCTTCTCCC |
| | | TGTTCAAGACCGACGAGGACATCACCGGCCGGCTGAAGGACCGGGTGCAGCCCGAGATCCTGGAGGCCCTGCTGAAGCACATC |
| | | TCCTTCGACAAGTTCGTGCAGATCTCCCTGAAGGCCCTGCGGCGGATCGTGCCCCTGATGGAGCAGGGCAAGCGGTACGACGA |
| | | GGCCTGCGCCGAGATCTACGGCGACCACTACGGCAAGAAGAACACCGAGGAGAAGATCTACCTGCCCCCCATCCCCGCCGACG |
| | | AGATCCGGAACCCCGTGGTGCTGCGGGCCCTGTCCCAGGCCCGGAAGGTGATCAACGGCGTGGTGCGGCGGTACGGCTCCCCC |
| | | GCCCGGATCCACATCGAGACCGCCCGGGAGGTGGGCAAGTCCTTCAAGGACCGGAAGGAGATCGAGAAGCGGCAGGAGGAGAA |
| | | CCGGAAGGACCGGGAGAAGGCCGCCGCCAAGTTCCGGGAGTACTTCCCCAACTTCGTGGGCGAGCCCAAGTCCAAGGACATCC |
| | | TGAAGCTGCGGCTGTACGAGCAGCAGCACGGCAAGTGCCTGTACTCCGGCAAGGAGATCAACCTGGTGCGGCTGAACGAGAAG |
| | | GGCTACGTGGAGATCGACGCCGCCCTGCCCTTCTCCCGGACCTGGGACGACTCCTTCAACAACAAGGTGCTGGTGCTGGGCTC |
| | | CGAGAACCAGAACAAGGGCAACCAGACCCCCTACGAGTACTTCAACGGCAAGGACAACTCCCGGGAGTGGCAGGAGTTCAAGG |
| | | CCCGGGTGGAGACCTCCCGGTTCCCCCGGTCCAAGAAGCAGCGGATCCTGCTGCAGAAGTTCGACGAGGACGGCTTCAAGGAG |
| | | TGCAACCTGAACGACACCCGGTACGTGAACCGGTTCCTGTGCCAGTTCGTGGCCGACCACATCCTGCTGACCGGCAAGGGCAA |
| | | GCGGCGGGTGTTCGCCTCCAACGGCCAGATCACCAACCTGCTGCGGGGCTTCTGGGGCCTGCGGAAGGTGCGGGCCGAGAACG |
| | | ACCGGCACCACGCCCTGGACGCCGTGGTGGTGGCCTGCTCCACCGTGGCCATGCAGCAGAAGATCACCCGGTTCGTGCGGTAC |
| | | AAGGAGATGAACGCCTTCGACGGCAAGACCATCGACAAGGAGACCGGCAAGGTGCTGCACCAGAAGACCCACTTCCCCCAGCC |
| | | CTGGGAGTTCTTCGCCCAGGAGGTGATGATCCGGGTGTTCGGCAAGCCCGACGGCAAGCCCGAGTTCGAGGAGGCCGACACCC |
| | | CCGAGAAGCTGCGGACCCTGCTGGCCGAGAAGCTGTCCTCCCGGCCCGAGGCCGTGCACGAGTACGTGACCCCCCTGTTCGTG |
| | | TCCCGGGCCCCCAACCGGAAGATGTCCGGCGCCCACAAGGACACCCTGCGGTCCGCCAAGCGGTTCGTGAAGCACAACGAGAA |
| | | GATCTCCGTGAAGCGGGTGTGGCTGACCGAGATCAAGCTGGCCGACCTGGAGAACATGGTGAACTACAAGAACGGCCGGGAGA |
| | | TCGAGCTGTACGAGGCCCTGAAGGCCCGGCTGGAGGCCTACGGCGGCAACGCCAAGCAGGCCTTCGACCCCAAGGACAACCCC |
| | | TTCTACAAGAAGGGCGGCCAGCTGGTGAAGGCCGTGCGGGTGGAGAAGACCCAGGAGTCCGGCGTGCTGCTGAACAAGAAGAA |
| | | CGCCTACACCATCGCCGACAACGGCGACATGGTGCGGGTGGACGTGTTCTGCAAGGTGGACAAGAAGGGCAAGAACCAGTACT |
| | | TCATCGTGCCCATCTACGCCTGGCAGGTGGCCGAGAACATCCTGCCCGACATCGACTGCAAGGGCTACCGGATCGACGACTCC |
| | | TACACCTTCTGCTTCTCCCTGCACAAGTACGACCTGATCGCCTTCCAGAAGGACGAGAAGTCCAAGGTGGAGTTCGCCTACTA |
| | | CATCAACTGCGACTCCTCCAACGGCCGGTTCTACCTGGCCTGGCACGACAAGGGCTCCAAGGAGCAGCAGTTCCGGATCTCCA |
| | | CCCAGAACCTGGTGCTGATCCAGAAGTACCAGGTGAACGAGCTGGGCAAGGAGATCCGGCCCTGCCGGCTGAAGAAGCGGCCC |
| | | CCCGTGCGGUGA |
| Exemplary | 261 | ATGGCCGCCTTCAAGCCCAACCCCATCAACTACATCCTGGGCCTGGCCATCGGCATCGCCTCCGTGGGCTGGGCCATGGTGGA |
| open | | GATCGACGAGGAGGAGAACCCCATCCGGCTGATCGACCTGGGCGTGCGGGTGTTCGAGCGGGCCGAGGTGCCCAAGACCGGCG |
| reading | | ACTCCCTGGCCATGGCCCGGCGGCTGGCCCGGTCCGTGCGGCGGCTGACCCGGCGGGGGCCCACCGGCTGCTGCGGGCCCGG |
| frame for | | CGGCTGCTGAAGCGGGAGGGCGTGCTGCAGGCCGCCGACTTCGACGAGAACGGCCTGATCAAGTCCCTGCCCAACACCCCCTG |
| Nme2Cas9 | | GCAGCTGCGGGCCGCCGCCCTGGACCGGAAGCTGACCCCCCTGGAGTGGTCCGCCGTGCTGCTGCACCTGATCAAGCACCGGG |
| dCas9 | | GCTACCTGTCCCAGCGGAAGAACGAGGGCGAGACCGCCGACAAGGAGCTGGGCGCCCTGCTGAAGGGCGTGGCCAACAACGCC |
| | | CACGCCCTGCAGACCGGCGACTTCCGGACCCCCGCCGAGCTGGCCCTGAACAAGTTCGAGAAGGAGTCCGGCCACATCCGGAA |
| | | CCAGCGGGGCGACTACTCCCACACCTTCTCCCGGAAGGACCTGCAGGCCGAGCTGATCCTGCTGTTCGAGAAGCAGAAGGAGT |
| | | TCGGCAACCCCCACGTGTCCGGCGGCCTGAAGGAGGGCATCGAGACCCTGCTGATGACCCAGCGGCCCGCCCTGTCCGGCGAC |
| | | GCCGTGCAGAAGATGCTGGGCCACTGCACCTTCGAGCCCGCCGAGCCCAAGGCCGCCAAGAACACCTACACCGCCGAGCGGTT |
| | | CATCTGGCTGACCAAGCTGAACAACCTGCGGATCCTGGAGCAGGGCTCCGAGCGGCCCCTGACCGACACCGAGCGGGCCACCC |
| | | TGATGGACGAGCCCTACCGGAAGTCCAAGCTGACCTACGCCCAGGCCCGGAAGCTGCTGGGCCTGGAGGACACCGCCTTCTTC |
| | | AAGGGCCTGCGGTACGGCAAGGACAACGCCGAGGCCTCCACCCTGATGGAGATGAAGGCCTACCACGCCATCTCCCGGGCCCT |
| | | GGAGAAGGAGGGCCTGAAGGACAAGAAGTCCCCCCTGAACCTGTCCTCCGAGCTGCAGGACGAGATCGGCACCGCCTTCTCCC |
| | | TGTTCAAGACCGACGAGGACATCACCGGCCGGCTGAAGGACCGGGTGCAGCCCGAGATCCTGGAGGCCCTGCTGAAGCACATC |
| | | TCCTTCGACAAGTTCGTGCAGATCTCCCTGAAGGCCCTGCGGCGGATCGTGCCCCTGATGGAGCAGGGCAAGCGGTACGACGA |
| | | GGCCTGCGCCGAGATCTACGGCGACCACTACGGCAAGAAGAACACCGAGGAGAAGATCTACCTGCCCCCCATCCCCGCCGACG |
| | | AGATCCGGAACCCCGTGGTGCTGCGGGCCCTGTCCCAGGCCCGGAAGGTGATCAACGGCGTGGTGCGGCGGTACGGCTCCCCC |
| | | GCCCGGATCCACATCGAGACCGCCCGGGAGGTGGGCAAGTCCTTCAAGGACCGGAAGGAGATCGAGAAGCGGCAGGAGGAGAA |
| | | CCGGAAGGACCGGGAGAAGGCCGCCGCCAAGTTCCGGGAGTACTTCCCCAACTTCGTGGGCGAGCCCAAGTCCAAGGACATCC |
| | | TGAAGCTGCGGCTGTACGAGCAGCAGCACGGCAAGTGCCTGTACTCCGGCAAGGAGATCAACCTGGTGCGGCTGAACGAGAAG |
| | | GGCTACGTGGAGATCGACGCCGCCCTGCCCTTCTCCCGGACCTGGGACGACTCCTTCAACAACAAGGTGCTGGTGCTGGGCTC |
| | | CGAGAACCAGAACAAGGGCAACCAGACCCCCTACGAGTACTTCAACGGCAAGGACAACTCCCGGGAGTGGCAGGAGTTCAAGG |
| | | CCCGGGTGGAGACCTCCCGGTTCCCCCGGTCCAAGAAGCAGCGGATCCTGCTGCAGAAGTTCGACGAGGACGGCTTCAAGGAG |
| | | TGCAACCTGAACGACACCCGGTACGTGAACCGGTTCCTGTGCCAGTTCGTGGCCGACCACATCCTGCTGACCGGCAAGGGCAA |
| | | GCGGCGGGTGTTCGCCTCCAACGGCCAGATCACCAACCTGCTGCGGGGCTTCTGGGGCCTGCGGAAGGTGCGGGCCGAGAACG |
| | | ACCGGCACCACGCCCTGGACGCCGTGGTGGTGGCCTGCTCCACCGTGGCCATGCAGCAGAAGATCACCCGGTTCGTGCGGTAC |
| | | AAGGAGATGAACGCCTTCGACGGCAAGACCATCGACAAGGAGACCGGCAAGGTGCTGCACCAGAAGACCCACTTCCCCCAGCC |
| | | CTGGGAGTTCTTCGCCCAGGAGGTGATGATCCGGGTGTTCGGCAAGCCCGACGGCAAGCCCGAGTTCGAGGAGGCCGACACCC |
| | | CCGAGAAGCTGCGGACCCTGCTGGCCGAGAAGCTGTCCTCCCGGCCCGAGGCCGTGCACGAGTACGTGACCCCCCTGTTCGTG |
| | | TCCCGGGCCCCCAACCGGAAGATGTCCGGCGCCCACAAGGACACCCTGCGGTCCGCCAAGCGGTTCGTGAAGCACAACGAGAA |
| | | GATCTCCGTGAAGCGGGTGTGGCTGACCGAGATCAAGCTGGCCGACCTGGAGAACATGGTGAACTACAAGAACGGCCGGGAGA |
| | | TCGAGCTGTACGAGGCCCTGAAGGCCCGGCTGGAGGCCTACGGCGGCAACGCCAAGCAGGCCTTCGACCCCAAGGACAACCCC |
| | | TTCTACAAGAAGGGCGGCCAGCTGGTGAAGGCCGTGCGGGTGGAGAAGACCCAGGAGTCCGGCGTGCTGCTGAACAAGAAGAA |
| | | CGCCTACACCATCGCCGACAACGGCGACATGGTGCGGGTGGACGTGTTCTGCAAGGTGGACAAGAAGGGCAAGAACCAGTACT |
| | | TCATCGTGCCCATCTACGCCTGGCAGGTGGCCGAGAACATCCTGCCCGACATCGACTGCAAGGGCTACCGGATCGACGACTCC |
| | | TACACCTTCTGCTTCTCCCTGCACAAGTACGACCTGATCGCCTTCCAGAAGGACGAGAAGTCCAAGGTGGAGTTCGCCTACTA |
| | | CATCAACTGCGACTCCTCCAACGGCCGGTTCTACCTGGCCTGGCACGACAAGGGCTCCAAGGAGCAGCAGTTCCGGATCTCCA |
| | | CCCAGAACCTGGTGCTGATCCAGAAGTACCAGGTGAACGAGCTGGGCAAGGAGATCCGGCCCTGCCGGCTGAAGAAGCGGCCC |
| | | CCCGTGCGGUAA |
| Exemplary | 262 | MAAFKPNPINYILGLAIGIASVGWAMVEIDEEENPIRLIDLGVRVFERAEVPKTGDSLAMARRLARSVRRLTRRRAHRLLRAR |
| amino | | RLLKREGVLQAADFDENGLIKSLPNTPWQLRAAALDRKLTPLEWSAVLLHLIKHRGYLSQRKNEGETADKELGALLKGVANNA |
| acid | | HALQTGDFRTPAELALNKFEKESGHIRNQRGDYSHTFSRKDLQAELILLFEKQKEFGNPHVSGGLKEGIETLLMTQRPALSGD |
| sequence | | AVQKMLGHCTFEPAEPKAAKNTYTAERFIWLTKLNNLRILEQGSERPLTDTERATLMDEPYRKSKLTYAQARKLLGLEDTAFF |
| of | | KGLRYGKDNAEASTLMEMKAYHAISRALEKEGLKDKKSPLNLSSELQDEIGTAFSLFKTDEDITGRLKDRVQPEILEALLKHI |
| Nme2Cas9 | | SFDKFVQISLKALRRIVPLMEQGKRYDEACAEIYGDHYGKKNTEEKIYLPPIPADEIRNPVVLRALSQARKVINGVVRRYGSP |
| Ruvc | | ARIHIETAREVGKSFKDRKEIEKRQEENRKDREKAAAKFREYFPNFVGEPKSKDILKLRLYEQQHGKCLYSGKEINLVRLNEK |
| nickase | | GYVEIDHALPFSRTWDDSFNNKVLVLGSENQNKGNQTPYEYENGKDNSREWQEFKARVETSRFPRSKKQRILLQKEDEDGEKE |
| | | CNLNDTRYVNRFLCQFVADHILLTGKGKRRVFASNGQITNLLRGFWGLRKVRAENDRHHALDAVVVACSTVAMQQKITRFVRY |
| | | KEMNAFDGKTIDKETGKVLHQKTHFPQPWEFFAQEVMIRVFGKPDGKPEFEEADTPEKLRTLLAEKLSSRPEAVHEYVTPLFV |
| | | SRAPNRKMSGAHKDTLRSAKRFVKHNEKISVKRVWLTEIKLADLENMVNYKNGREIELYEALKARLEAYGGNAKQAFDPKDNP |
| | | FYKKGGQLVKAVRVEKTQESGVLLNKKNAYTIADNGDMVRVDVFCKVDKKGKNQYFIVPIYAWQVAENILPDIDCKGYRIDDS |
| | | YTFCFSLHKYDLIAFQKDEKSKVEFAYYINCDSSNGRFYLAWHDKGSKEQQFRISTQNLVLIQKYQVNELGKEIRPCRLKKRP |
| | | PVR |
| Exemplary | 263 | GCTGCTTTTAAGCCTAATCCTATTAATTATATTCTTGGTCTTGCTATTGGTATTGCTTCTGTTGGTTGGGCTATGGTTGAGAT |
| coding | | TGATGAGGAGGAGAATCCTATTCGTCTTATTGATCTTGGTGTTCGTGTTTTTGAGCGTGCTGAGGTTCCTAAGACTGGTGATT |
| sequence | | CTCTTGCTATGGCTCGTCGTCTTGCTCGTTCTGTTCGTCGTCTTACTCGTCGTCGTGCTCATCGTCTTCTTCGTGCTCGTCGT |
| encoding | | CTTCTTAAGCGTGAGGGTGTTCTTCAGGCTGCTGATTTTGATGAGAATGGTCTTATTAAGTCTCTTCCTAATACTCCTTGGCA |
| Nme2Cas9 | | GCTTCGTGCTGCTGCTCTTGATCGTAAGCTTACTCCTCTTGAGTGGTCTGCTGTTCTTCTTCATCTTATTAAGCATCGTGGTT |
| Ruvc | | ATCTTTCTCAGCGTAAGAATGAGGGTGAGACTGCTGATAAGGAGCTTGGTGCTCTTCTTAAGGGTGTTGCTAATAATGCTCAT |
| nickase | | GCTCTTCAGACTGGTGATTTTCGTACTCCTGCTGAGCTTGCTCTTAATAAGTTTGAGAAGGAGTCTGGTCATATTCGTAATCA |
| | | GCGTGGTGATTATTCTCATACTTTTTCTCGTAAGGATCTTCAGGCTGAGCTTATTCTTCTTTTTGAGAAGCAGAAGGAGTTTG |
| | | GTAATCCTCATGTTTCTGGTGGTCTTAAGGAGGGTATTGAGACTCTTCTTATGACTCAGCGTCCTGCTCTTTCTGGTGATGCT |
| | | GTTCAGAAGATGCTTGGTCATTGTACTTTTGAGCCTGCTGAGCCTAAGGCTGCTAAGAATACTTATACTGCTGAGCGTTTTAT |
| | | TTGGCTTACTAAGCTTAATAATCTTCGTATTCTTGAGCAGGGTTCTGAGCGTCCTCTTACTGATACTGAGCGTGCTACTCTTA |
| | | TGGATGAGCCTTATCGTAAGTCTAAGCTTACTTATGCTCAGGCTCGTAAGCTTCTTGGTCTTGAGGATACTGCTTTTTTTAAG |
| | | GGTCTTCGTTATGGTAAGGATAATGCTGAGGCTTCTACTCTTATGGAGATGAAGGCTTATCATGCTATTTCTCGTGCTCTTGA |
| | | GAAGGAGGGTCTTAAGGATAAGAAGTCTCCTCTTAATCTTTCTTCTGAGCTTCAGGATGAGATTGGTACTGCTTTTTCTCTTT |
| | | TTAAGACTGATGAGGATATTACTGGTCGTCTTAAGGATCGTGTTCAGCCTGAGATTCTTGAGGCTCTTCTTAAGCATATTTCT |
| | | TTTGATAAGTTTGTTCAGATTTCTCTTAAGGCTCTTCGTCGTATTGTTCCTCTTATGGAGCAGGGTAAGCGTTATGATGAGGC |
| | | TTGTGCTGAGATTTATGGTGATCATTATGGTAAGAAGAATACTGAGGAGAAGATTTATCTTCCTCCTATTCCTGCTGATGAGA |
| | | TTCGTAATCCTGTTGTTCTTCGTGCTCTTTCTCAGGCTCGTAAGGTTATTAATGGTGTTGTTCGTCGTTATGGTTCTCCTGCT |
| | | CGTATTCATATTGAGACTGCTCGTGAGGTTGGTAAGTCTTTTAAGGATCGTAAGGAGATTGAGAAGCGTCAGGAGGAGAATCG |
| | | TAAGGATCGTGAGAAGGCTGCTGCTAAGTTTCGTGAGTATTTTCCTAATTTTGTTGGTGAGCCTAAGTCTAAGGATATTCTTA |
| | | AGCTTCGTCTTTATGAGCAGCAGCATGGTAAGTGTCTTTATTCTGGTAAGGAGATTAATCTTGTTCGTCTTAATGAGAAGGGT |
| | | TATGTTGAGATTGATCATGCTCTTCCTTTTTCTCGTACTTGGGATGATTCTTTTAATAATAAGGTTCTTGTTCTTGGTTCTGA |
| | | GAATCAGAATAAGGGTAATCAGACTCCTTATGAGTATTTTAATGGTAAGGATAATTCTCGTGAGTGGCAGGAGTTTAAGGCTC |
| | | GTGTTGAGACTTCTCGTTTTCCTCGTTCTAAGAAGCAGCGTATTCTTCTTCAGAAGTTTGATGAGGATGGTTTTAAGGAGTGT |
| | | AATCTTAATGATACTCGTTATGTTAATCGTTTTCTTTGTCAGTTTGTTGCTGATCATATTCTTCTTACTGGTAAGGGTAAGCG |
| | | TCGTGTTTTTGCTTCTAATGGTCAGATTACTAATCTTCTTCGTGGTTTTTGGGGTCTTCGTAAGGTTCGTGCTGAGAATGATC |
| | | GTCATCATGCTCTTGATGCTGTTGTTGTTGCTTGTTCTACTGTTGCTATGCAGCAGAAGATTACTCGTTTTGTTCGTTATAAG |
| | | GAGATGAATGCTTTTGATGGTAAGACTATTGATAAGGAGACTGGTAAGGTTCTTCATCAGAAGACTCATTTTCCTCAGCCTTG |
| | | GGAGTTTTTTGCTCAGGAGGTTATGATTCGTGTTTTTGGTAAGCCTGATGGTAAGCCTGAGTTTGAGGAGGCTGATACTCCTG |
| | | AGAAGCTTCGTACTCTTCTTGCTGAGAAGCTTTCTTCTCGTCCTGAGGCTGTTCATGAGTATGTTACTCCTCTTTTTGTTTCT |
| | | CGTGCTCCTAATCGTAAGATGTCTGGTGCTCATAAGGATACTCTTCGTTCTGCTAAGCGTTTTGTTAAGCATAATGAGAAGAT |
| | | TTCTGTTAAGCGTGTTTGGCTTACTGAGATTAAGCTTGCTGATCTTGAGAATATGGTTAATTATAAGAATGGTCGTGAGATTG |
| | | AGCTTTATGAGGCTCTTAAGGCTCGTCTTGAGGCTTATGGTGGTAATGCTAAGCAGGCTTTTGATCCTAAGGATAATCCTTTT |
| | | TATAAGAAGGGTGGTCAGCTTGTTAAGGCTGTTCGTGTTGAGAAGACTCAGGAGTCTGGTGTTCTTCTTAATAAGAAGAATGC |
| | | TTATACTATTGCTGATAATGGTGATATGGTTCGTGTTGATGTTTTTTGTAAGGTTGATAAGAAGGGTAAGAATCAGTATTTTA |
| | | TTGTTCCTATTTATGCTTGGCAGGTTGCTGAGAATATTCTTCCTGATATTGATTGTAAGGGTTATCGTATTGATGATTCTTAT |
| | | ACTTTTTGTTTTTCTCTTCATAAGTATGATCTTATTGCTTTTCAGAAGGATGAGAAGTCTAAGGTTGAGTTTGCTTATTATAT |
| | | TAATTGTGATTCTTCTAATGGTCGTTTTTATCTTGCTTGGCATGATAAGGGTTCTAAGGAGCAGCAGTTTCGTATTTCTACTC |
| | | AGAATCTTGTTCTTATTCAGAAGTATCAGGTTAATGAGCTTGGTAAGGAGATTCGTCCTTGTCGTCTTAAGAAGCGTCCTCCT |
| | | GTTCGT |
| Exemplary | 264 | GCCGCCTTCAAGCCCAACCCCATCAACTACATCCTGGGCCTGGCCATCGGCATCGCCTCCGTGGGCTGGGCCATGGTGGAGAT |
| coding | | CGACGAGGAGGAGAACCCCATCCGGCTGATCGACCTGGGCGTGCGGGTGTTCGAGCGGGCCGAGGTGCCCAAGACCGGCGACT |
| sequence | | CCCTGGCCATGGCCCGGCGGCTGGCCCGGTCCGTGCGGCGGCTGACCCGGCGGCGGGCCCACCGGCTGCTGCGGGCCCGGCGG |
| encoding | | CTGCTGAAGCGGGAGGGCGTGCTGCAGGCCGCCGACTTCGACGAGAACGGCCTGATCAAGTCCCTGCCCAACACCCCCTGGCA |
| Nme2Cas9 | | GCTGCGGGCCGCCGCCCTGGACCGGAAGCTGACCCCCCTGGAGTGGTCCGCCGTGCTGCTGCACCTGATCAAGCACCGGGGCT |
| Ruvc | | ACCTGTCCCAGCGGAAGAACGAGGGCGAGACCGCCGACAAGGAGCTGGGCGCCCTGCTGAAGGGCGTGGCCAACAACGCCCAC |
| nickase | | GCCCTGCAGACCGGCGACTTCCGGACCCCCGCCGAGCTGGCCCTGAACAAGTTCGAGAAGGAGTCCGGCCACATCCGGAACCA |
| | | GCGGGGCGACTACTCCCACACCTTCTCCCGGAAGGACCTGCAGGCCGAGCTGATCCTGCTGTTCGAGAAGCAGAAGGAGTTCG |
| | | GCAACCCCCACGTGTCCGGCGGCCTGAAGGAGGGCATCGAGACCCTGCTGATGACCCAGCGGCCCGCCCTGTCCGGCGACGCC |
| | | GTGCAGAAGATGCTGGGCCACTGCACCTTCGAGCCCGCCGAGCCCAAGGCCGCCAAGAACACCTACACCGCCGAGCGGTTCAT |
| | | CTGGCTGACCAAGCTGAACAACCTGCGGATCCTGGAGCAGGGCTCCGAGCGGCCCCTGACCGACACCGAGCGGGCCACCCTGA |
| | | TGGACGAGCCCTACCGGAAGTCCAAGCTGACCTACGCCCAGGCCCGGAAGCTGCTGGGCCTGGAGGACACCGCCTTCTTCAAG |
| | | GGCCTGCGGTACGGCAAGGACAACGCCGAGGCCTCCACCCTGATGGAGATGAAGGCCTACCACGCCATCTCCCGGGCCCTGGA |
| | | GAAGGAGGGCCTGAAGGACAAGAAGTCCCCCCTGAACCTGTCCTCCGAGCTGCAGGACGAGATCGGCACCGCCTTCTCCCTGT |
| | | TCAAGACCGACGAGGACATCACCGGCCGGCTGAAGGACCGGGTGCAGCCCGAGATCCTGGAGGCCCTGCTGAAGCACATCTCC |
| | | TTCGACAAGTTCGTGCAGATCTCCCTGAAGGCCCTGCGGCGGATCGTGCCCCTGATGGAGCAGGGCAAGCGGTACGACGAGGC |
| | | CTGCGCCGAGATCTACGGCGACCACTACGGCAAGAAGAACACCGAGGAGAAGATCTACCTGCCCCCCATCCCCGCCGACGAGA |
| | | TCCGGAACCCCGTGGTGCTGCGGGCCCTGTCCCAGGCCCGGAAGGTGATCAACGGCGTGGTGCGGCGGTACGGCTCCCCCGCC |
| | | CGGATCCACATCGAGACCGCCCGGGAGGTGGGCAAGTCCTTCAAGGACCGGAAGGAGATCGAGAAGCGGCAGGAGGAGAACCG |
| | | GAAGGACCGGGAGAAGGCCGCCGCCAAGTTCCGGGAGTACTTCCCCAACTTCGTGGGCGAGCCCAAGTCCAAGGACATCCTGA |
| | | AGCTGCGGCTGTACGAGCAGCAGCACGGCAAGTGCCTGTACTCCGGCAAGGAGATCAACCTGGTGCGGCTGAACGAGAAGGGC |
| | | TACGTGGAGATCGACCACGCCCTGCCCTTCTCCCGGACCTGGGACGACTCCTTCAACAACAAGGTGCTGGTGCTGGGCTCCGA |
| | | GAACCAGAACAAGGGCAACCAGACCCCCTACGAGTACTTCAACGGCAAGGACAACTCCCGGGAGTGGCAGGAGTTCAAGGCCC |
| | | GGGTGGAGACCTCCCGGTTCCCCCGGTCCAAGAAGCAGCGGATCCTGCTGCAGAAGTTCGACGAGGACGGCTTCAAGGAGTGC |
| | | AACCTGAACGACACCCGGTACGTGAACCGGTTCCTGTGCCAGTTCGTGGCCGACCACATCCTGCTGACCGGCAAGGGCAAGCG |
| | | GCGGGTGTTCGCCTCCAACGGCCAGATCACCAACCTGCTGCGGGGCTTCTGGGGCCTGCGGAAGGTGCGGGCCGAGAACGACC |
| | | GGCACCACGCCCTGGACGCCGTGGTGGTGGCCTGCTCCACCGTGGCCATGCAGCAGAAGATCACCCGGTTCGTGCGGTACAAG |
| | | GAGATGAACGCCTTCGACGGCAAGACCATCGACAAGGAGACCGGCAAGGTGCTGCACCAGAAGACCCACTTCCCCCAGCCCTG |
| | | GGAGTTCTTCGCCCAGGAGGTGATGATCCGGGTGTTCGGCAAGCCCGACGGCAAGCCCGAGTTCGAGGAGGCCGACACCCCCG |
| | | AGAAGCTGCGGACCCTGCTGGCCGAGAAGCTGTCCTCCCGGCCCGAGGCCGTGCACGAGTACGTGACCCCCCTGTTCGTGTCC |
| | | CGGGCCCCCAACCGGAAGATGTCCGGCGCCCACAAGGACACCCTGCGGTCCGCCAAGCGGTTCGTGAAGCACAACGAGAAGAT |
| | | CTCCGTGAAGCGGGTGTGGCTGACCGAGATCAAGCTGGCCGACCTGGAGAACATGGTGAACTACAAGAACGGCCGGGAGATCG |
| | | AGCTGTACGAGGCCCTGAAGGCCCGGCTGGAGGCCTACGGCGGCAACGCCAAGCAGGCCTTCGACCCCAAGGACAACCCCTTC |
| | | TACAAGAAGGGCGGCCAGCTGGTGAAGGCCGTGCGGGTGGAGAAGACCCAGGAGTCCGGCGTGCTGCTGAACAAGAAGAACGC |
| | | CTACACCATCGCCGACAACGGCGACATGGTGCGGGTGGACGTGTTCTGCAAGGTGGACAAGAAGGGCAAGAACCAGTACTTCA |
| | | TCGTGCCCATCTACGCCTGGCAGGTGGCCGAGAACATCCTGCCCGACATCGACTGCAAGGGCTACCGGATCGACGACTCCTAC |
| | | ACCTTCTGCTTCTCCCTGCACAAGTACGACCTGATCGCCTTCCAGAAGGACGAGAAGTCCAAGGTGGAGTTCGCCTACTACAT |
| | | CAACTGCGACTCCTCCAACGGCCGGTTCTACCTGGCCTGGCACGACAAGGGCTCCAAGGAGCAGCAGTTCCGGATCTCCACCC |
| | | AGAACCTGGTGCTGATCCAGAAGTACCAGGTGAACGAGCTGGGCAAGGAGATCCGGCCCTGCCGGCTGAAGAAGCGGCCCCCC |
| | | GTGCGG |
| Exemplary | 265 | GCCGCCTTCAAGCCCAACCCCATCAACTACATCCTGGGCCTGGCCATCGGCATCGCCTCCGTGGGCTGGGCCATGGTGGAGAT |
| coding | | CGACGAGGAGGAGAACCCCATCCGGCTGATCGACCTGGGCGTGCGGGTGTTCGAGCGGGCCGAGGTGCCCAAGACCGGCGACT |
| sequence | | CCCTGGCCATGGCCCGGCGGCTGGCCCGGTCCGTGCGGCGGCTGACCCGGCGGCGGGCCCACCGGCTGCTGCGGGCCCGGCGG |
| encoding | | CTGCTGAAGCGGGAGGGCGTGCTGCAGGCCGCCGACTTCGACGAGAACGGCCTGATCAAGTCCCTGCCCAACACCCCCTGGCA |
| Nme2Cas9 | | GCTGCGGGCCGCCGCCCTGGACCGGAAGCTGACCCCCCTGGAGTGGTCCGCCGTGCTGCTGCACCTGATCAAGCACCGGGGCT |
| Ruvc | | ACCTGTCCCAGCGGAAGAACGAGGGCGAGACCGCCGACAAGGAGCTGGGCGCCCTGCTGAAGGGCGTGGCCAACAACGCCCAC |
| nickase | | GCCCTGCAGACCGGCGACTTCCGGACCCCCGCCGAGCTGGCCCTGAACAAGTTCGAGAAGGAGTCCGGCCACATCCGGAACCA |
| | | GCGGGGCGACTACTCCCACACCTTCTCCCGGAAGGACCTGCAGGCCGAGCTGATCCTGCTGTTCGAGAAGCAGAAGGAGTTCG |
| | | GCAACCCCCACGTGTCCGGCGGCCTGAAGGAGGGCATCGAGACCCTGCTGATGACCCAGCGGCCCGCCCTGTCCGGCGACGCC |
| | | GTGCAGAAGATGCTGGGCCACTGCACCTTCGAGCCCGCCGAGCCCAAGGCCGCCAAGAACACCTACACCGCCGAGCGGTTCAT |
| | | CTGGCTGACCAAGCTGAACAACCTGCGGATCCTGGAGCAGGGCTCCGAGCGGCCCCTGACCGACACCGAGCGGGCCACCCTGA |
| | | TGGACGAGCCCTACCGGAAGTCCAAGCTGACCTACGCCCAGGCCCGGAAGCTGCTGGGCCTGGAGGACACCGCCTTCTTCAAG |
| | | GGCCTGCGGTACGGCAAGGACAACGCCGAGGCCTCCACCCTGATGGAGATGAAGGCCTACCACGCCATCTCCCGGGCCCTGGA |
| | | GAAGGAGGGCCTGAAGGACAAGAAGTCCCCCCTGAACCTGTCCTCCGAGCTGCAGGACGAGATCGGCACCGCCTTCTCCCTGT |
| | | TCAAGACCGACGAGGACATCACCGGCCGGCTGAAGGACCGGGTGCAGCCCGAGATCCTGGAGGCCCTGCTGAAGCACATCTCC |
| | | TTCGACAAGTTCGTGCAGATCTCCCTGAAGGCCCTGCGGCGGATCGTGCCCCTGATGGAGCAGGGCAAGCGGTACGACGAGGC |
| | | CTGCGCCGAGATCTACGGCGACCACTACGGCAAGAAGAACACCGAGGAGAAGATCTACCTGCCCCCCATCCCCGCCGACGAGA |
| | | TCCGGAACCCCGTGGTGCTGCGGGCCCTGTCCCAGGCCCGGAAGGTGATCAACGGCGTGGTGCGGCGGTACGGCTCCCCCGCC |
| | | CGGATCCACATCGAGACCGCCCGGGAGGTGGGCAAGTCCTTCAAGGACCGGAAGGAGATCGAGAAGCGGCAGGAGGAGAACCG |
| | | GAAGGACCGGGAGAAGGCCGCCGCCAAGTTCCGGGAGTACTTCCCCAACTTCGTGGGCGAGCCCAAGTCCAAGGACATCCTGA |
| | | AGCTGCGGCTGTACGAGCAGCAGCACGGCAAGTGCCTGTACTCCGGCAAGGAGATCAACCTGGTGCGGCTGAACGAGAAGGGC |
| | | TACGTGGAGATCGACCACGCCCTGCCCTTCTCCCGGACCTGGGACGACTCCTTCAACAACAAGGTGCTGGTGCTGGGCTCCGA |
| | | GAACCAGAACAAGGGCAACCAGACCCCCTACGAGTACTTCAACGGCAAGGACAACTCCCGGGAGTGGCAGGAGTTCAAGGCCC |
| | | GGGTGGAGACCTCCCGGTTCCCCCGGTCCAAGAAGCAGCGGATCCTGCTGCAGAAGTTCGACGAGGACGGCTTCAAGGAGTGC |
| | | AACCTGAACGACACCCGGTACGTGAACCGGTTCCTGTGCCAGTTCGTGGCCGACCACATCCTGCTGACCGGCAAGGGCAAGCG |
| | | GCGGGTGTTCGCCTCCAACGGCCAGATCACCAACCTGCTGCGGGGCTTCTGGGGCCTGCGGAAGGTGCGGGCCGAGAACGACC |
| | | GGCACCACGCCCTGGACGCCGTGGTGGTGGCCTGCTCCACCGTGGCCATGCAGCAGAAGATCACCCGGTTCGTGCGGTACAAG |
| | | GAGATGAACGCCTTCGACGGCAAGACCATCGACAAGGAGACCGGCAAGGTGCTGCACCAGAAGACCCACTTCCCCCAGCCCTG |
| | | GGAGTTCTTCGCCCAGGAGGTGATGATCCGGGTGTTCGGCAAGCCCGACGGCAAGCCCGAGTTCGAGGAGGCCGACACCCCCG |
| | | AGAAGCTGCGGACCCTGCTGGCCGAGAAGCTGTCCTCCCGGCCCGAGGCCGTGCACGAGTACGTGACCCCCCTGTTCGTGTCC |
| | | CGGGCCCCCAACCGGAAGATGTCCGGCGCCCACAAGGACACCCTGCGGTCCGCCAAGCGGTTCGTGAAGCACAACGAGAAGAT |
| | | CTCCGTGAAGCGGGTGTGGCTGACCGAGATCAAGCTGGCCGACCTGGAGAACATGGTGAACTACAAGAACGGCCGGGAGATCG |
| | | AGCTGTACGAGGCCCTGAAGGCCCGGCTGGAGGCCTACGGCGGCAACGCCAAGCAGGCCTTCGACCCCAAGGACAACCCCTTC |
| | | TACAAGAAGGGCGGCCAGCTGGTGAAGGCCGTGCGGGTGGAGAAGACCCAGGAGTCCGGCGTGCTGCTGAACAAGAAGAACGC |
| | | CTACACCATCGCCGACAACGGCGACATGGTGCGGGTGGACGTGTTCTGCAAGGTGGACAAGAAGGGCAAGAACCAGTACTTCA |
| | | TCGTGCCCATCTACGCCTGGCAGGTGGCCGAGAACATCCTGCCCGACATCGACTGCAAGGGCTACCGGATCGACGACTCCTAC |
| | | ACCTTCTGCTTCTCCCTGCACAAGTACGACCTGATCGCCTTCCAGAAGGACGAGAAGTCCAAGGTGGAGTTCGCCTACTACAT |
| | | CAACTGCGACTCCTCCAACGGCCGGTTCTACCTGGCCTGGCACGACAAGGGCTCCAAGGAGCAGCAGTTCCGGATCTCCACCC |
| | | AGAACCTGGTGCTGATCCAGAAGTACCAGGTGAACGAGCTGGGCAAGGAGATCCGGCCCTGCCGGCTGAAGAAGCGGCCCCCC |
| | | GTGCGG |
| Exemplary | 266 | ATGGCTGCTTTTAAGCCTAATCCTATTAATTATATTCTTGGTCTTGCTATTGGTATTGCTTCTGTTGGTTGGGCTATGGTTGA |
| open | | GATTGATGAGGAGGAGAATCCTATTCGTCTTATTGATCTTGGTGTTCGTGTTTTTGAGCGTGCTGAGGTTCCTAAGACTGGTG |
| reading | | ATTCTCTTGCTATGGCTCGTCGTCTTGCTCGTTCTGTTCGTCGTCTTACTCGTCGTCGTGCTCATCGTCTTCTTCGTGCTCGT |
| frame for | | CGTCTTCTTAAGCGTGAGGGTGTTCTTCAGGCTGCTGATTTTGATGAGAATGGTCTTATTAAGTCTCTTCCTAATACTCCTTG |
| Nme2Cas9 | | GCAGCTTCGTGCTGCTGCTCTTGATCGTAAGCTTACTCCTCTTGAGTGGTCTGCTGTTCTTCTTCATCTTATTAAGCATCGTG |
| Ruvc | | GTTATCTTTCTCAGCGTAAGAATGAGGGTGAGACTGCTGATAAGGAGCTTGGTGCTCTTCTTAAGGGTGTTGCTAATAATGCT |
| nickase | | CATGCTCTTCAGACTGGTGATTTTCGTACTCCTGCTGAGCTTGCTCTTAATAAGTTTGAGAAGGAGTCTGGTCATATTCGTAA |
| | | TCAGCGTGGTGATTATTCTCATACTTTTTCTCGTAAGGATCTTCAGGCTGAGCTTATTCTTCTTTTTGAGAAGCAGAAGGAGT |
| | | TTGGTAATCCTCATGTTTCTGGTGGTCTTAAGGAGGGTATTGAGACTCTTCTTATGACTCAGCGTCCTGCTCTTTCTGGTGAT |
| | | GCTGTTCAGAAGATGCTTGGTCATTGTACTTTTGAGCCTGCTGAGCCTAAGGCTGCTAAGAATACTTATACTGCTGAGCGTTT |
| | | TATTTGGCTTACTAAGCTTAATAATCTTCGTATTCTTGAGCAGGGTTCTGAGCGTCCTCTTACTGATACTGAGCGTGCTACTC |
| | | TTATGGATGAGCCTTATCGTAAGTCTAAGCTTACTTATGCTCAGGCTCGTAAGCTTCTTGGTCTTGAGGATACTGCTTTTTTT |
| | | AAGGGTCTTCGTTATGGTAAGGATAATGCTGAGGCTTCTACTCTTATGGAGATGAAGGCTTATCATGCTATTTCTCGTGCTCT |
| | | TGAGAAGGAGGGTCTTAAGGATAAGAAGTCTCCTCTTAATCTTTCTTCTGAGCTTCAGGATGAGATTGGTACTGCTTTTTCTC |
| | | TTTTTAAGACTGATGAGGATATTACTGGTCGTCTTAAGGATCGTGTTCAGCCTGAGATTCTTGAGGCTCTTCTTAAGCATATT |
| | | TCTTTTGATAAGTTTGTTCAGATTTCTCTTAAGGCTCTTCGTCGTATTGTTCCTCTTATGGAGCAGGGTAAGCGTTATGATGA |
| | | GGCTTGTGCTGAGATTTATGGTGATCATTATGGTAAGAAGAATACTGAGGAGAAGATTTATCTTCCTCCTATTCCTGCTGATG |
| | | AGATTCGTAATCCTGTTGTTCTTCGTGCTCTTTCTCAGGCTCGTAAGGTTATTAATGGTGTTGTTCGTCGTTATGGTTCTCCT |
| | | GCTCGTATTCATATTGAGACTGCTCGTGAGGTTGGTAAGTCTTTTAAGGATCGTAAGGAGATTGAGAAGCGTCAGGAGGAGAA |
| | | TCGTAAGGATCGTGAGAAGGCTGCTGCTAAGTTTCGTGAGTATTTTCCTAATTTTGTTGGTGAGCCTAAGTCTAAGGATATTC |
| | | TTAAGCTTCGTCTTTATGAGCAGCAGCATGGTAAGTGTCTTTATTCTGGTAAGGAGATTAATCTTGTTCGTCTTAATGAGAAG |
| | | GGTTATGTTGAGATTGATCATGCTCTTCCTTTTTCTCGTACTTGGGATGATTCTTTTAATAATAAGGTTCTTGTTCTTGGTTC |
| | | TGAGAATCAGAATAAGGGTAATCAGACTCCTTATGAGTATTTTAATGGTAAGGATAATTCTCGTGAGTGGCAGGAGTTTAAGG |
| | | CTCGTGTTGAGACTTCTCGTTTTCCTCGTTCTAAGAAGCAGCGTATTCTTCTTCAGAAGTTTGATGAGGATGGTTTTAAGGAG |
| | | TGTAATCTTAATGATACTCGTTATGTTAATCGTTTTCTTTGTCAGTTTGTTGCTGATCATATTCTTCTTACTGGTAAGGGTAA |
| | | GCGTCGTGTTTTTGCTTCTAATGGTCAGATTACTAATCTTCTTCGTGGTTTTTGGGGTCTTCGTAAGGTTCGTGCTGAGAATG |
| | | ATCGTCATCATGCTCTTGATGCTGTTGTTGTTGCTTGTTCTACTGTTGCTATGCAGCAGAAGATTACTCGTTTTGTTCGTTAT |
| | | AAGGAGATGAATGCTTTTGATGGTAAGACTATTGATAAGGAGACTGGTAAGGTTCTTCATCAGAAGACTCATTTTCCTCAGCC |
| | | TTGGGAGTTTTTTGCTCAGGAGGTTATGATTCGTGTTTTTGGTAAGCCTGATGGTAAGCCTGAGTTTGAGGAGGCTGATACTC |
| | | CTGAGAAGCTTCGTACTCTTCTTGCTGAGAAGCTTTCTTCTCGTCCTGAGGCTGTTCATGAGTATGTTACTCCTCTTTTTGTT |
| | | TCTCGTGCTCCTAATCGTAAGATGTCTGGTGCTCATAAGGATACTCTTCGTTCTGCTAAGCGTTTTGTTAAGCATAATGAGAA |
| | | GATTTCTGTTAAGCGTGTTTGGCTTACTGAGATTAAGCTTGCTGATCTTGAGAATATGGTTAATTATAAGAATGGTCGTGAGA |
| | | TTGAGCTTTATGAGGCTCTTAAGGCTCGTCTTGAGGCTTATGGTGGTAATGCTAAGCAGGCTTTTGATCCTAAGGATAATCCT |
| | | TTTTATAAGAAGGGTGGTCAGCTTGTTAAGGCTGTTCGTGTTGAGAAGACTCAGGAGTCTGGTGTTCTTCTTAATAAGAAGAA |
| | | TGCTTATACTATTGCTGATAATGGTGATATGGTTCGTGTTGATGTTTTTTGTAAGGTTGATAAGAAGGGTAAGAATCAGTATT |
| | | TTATTGTTCCTATTTATGCTTGGCAGGTTGCTGAGAATATTCTTCCTGATATTGATTGTAAGGGTTATCGTATTGATGATTCT |
| | | TATACTTTTTGTTTTTCTCTTCATAAGTATGATCTTATTGCTTTTCAGAAGGATGAGAAGTCTAAGGTTGAGTTTGCTTATTA |
| | | TATTAATTGTGATTCTTCTAATGGTCGTTTTTATCTTGCTTGGCATGATAAGGGTTCTAAGGAGCAGCAGTTTCGTATTTCTA |
| | | CTCAGAATCTTGTTCTTATTCAGAAGTATCAGGTTAATGAGCTTGGTAAGGAGATTCGTCCTTGTCGTCTTAAGAAGCGTCCT |
| | | CCTGTTCGTUGA |
| Exemplary | 267 | ATGGCCGCCTTCAAGCCCAACCCCATCAACTACATCCTGGGCCTGGCCATCGGCATCGCCTCCGTGGGCTGGGCCATGGTGGA |
| open | | GATCGACGAGGAGGAGAACCCCATCCGGCTGATCGACCTGGGCGTGCGGGTGTTCGAGCGGGCCGAGGTGCCCAAGACCGGCG |
| reading | | ACTCCCTGGCCATGGCCCGGCGGCTGGCCCGGTCCGTGCGGCGGCTGACCCGGCGGCGGGCCCACCGGCTGCTGCGGGCCCGG |
| frame for | | CGGCTGCTGAAGCGGGAGGGCGTGCTGCAGGCCGCCGACTTCGACGAGAACGGCCTGATCAAGTCCCTGCCCAACACCCCCTG |
| Nme2Cas9 | | GCAGCTGCGGGCCGCCGCCCTGGACCGGAAGCTGACCCCCCTGGAGTGGTCCGCCGTGCTGCTGCACCTGATCAAGCACCGGG |
| RuvC | | GCTACCTGTCCCAGCGGAAGAACGAGGGCGAGACCGCCGACAAGGAGCTGGGCGCCCTGCTGAAGGGCGTGGCCAACAACGCC |
| nickase | | CACGCCCTGCAGACCGGCGACTTCCGGACCCCCGCCGAGCTGGCCCTGAACAAGTTCGAGAAGGAGTCCGGCCACATCCGGAA |
| | | CCAGCGGGGCGACTACTCCCACACCTTCTCCCGGAAGGACCTGCAGGCCGAGCTGATCCTGCTGTTCGAGAAGCAGAAGGAGT |
| | | TCGGCAACCCCCACGTGTCCGGCGGCCTGAAGGAGGGCATCGAGACCCTGCTGATGACCCAGCGGCCCGCCCTGTCCGGCGAC |
| | | GCCGTGCAGAAGATGCTGGGCCACTGCACCTTCGAGCCCGCCGAGCCCAAGGCCGCCAAGAACACCTACACCGCCGAGCGGTT |
| | | CATCTGGCTGACCAAGCTGAACAACCTGCGGATCCTGGAGCAGGGCTCCGAGCGGCCCCTGACCGACACCGAGCGGGCCACCC |
| | | TGATGGACGAGCCCTACCGGAAGTCCAAGCTGACCTACGCCCAGGCCCGGAAGCTGCTGGGCCTGGAGGACACCGCCTTCTTC |
| | | AAGGGCCTGCGGTACGGCAAGGACAACGCCGAGGCCTCCACCCTGATGGAGATGAAGGCCTACCACGCCATCTCCCGGGCCCT |
| | | GGAGAAGGAGGGCCTGAAGGACAAGAAGTCCCCCCTGAACCTGTCCTCCGAGCTGCAGGACGAGATCGGCACCGCCTTCTCCC |
| | | TGTTCAAGACCGACGAGGACATCACCGGCCGGCTGAAGGACCGGGTGCAGCCCGAGATCCTGGAGGCCCTGCTGAAGCACATC |
| | | TCCTTCGACAAGTTCGTGCAGATCTCCCTGAAGGCCCTGCGGCGGATCGTGCCCCTGATGGAGCAGGGCAAGCGGTACGACGA |
| | | GGCCTGCGCCGAGATCTACGGCGACCACTACGGCAAGAAGAACACCGAGGAGAAGATCTACCTGCCCCCCATCCCCGCCGACG |
| | | AGATCCGGAACCCCGTGGTGCTGCGGGCCCTGTCCCAGGCCCGGAAGGTGATCAACGGCGTGGTGCGGCGGTACGGCTCCCCC |
| | | GCCCGGATCCACATCGAGACCGCCCGGGAGGTGGGCAAGTCCTTCAAGGACCGGAAGGAGATCGAGAAGCGGCAGGAGGAGAA |
| | | CCGGAAGGACCGGGAGAAGGCCGCCGCCAAGTTCCGGGAGTACTTCCCCAACTTCGTGGGCGAGCCCAAGTCCAAGGACATCC |
| | | TGAAGCTGCGGCTGTACGAGCAGCAGCACGGCAAGTGCCTGTACTCCGGCAAGGAGATCAACCTGGTGCGGCTGAACGAGAAG |
| | | GGCTACGTGGAGATCGACCACGCCCTGCCCTTCTCCCGGACCTGGGACGACTCCTTCAACAACAAGGTGCTGGTGCTGGGCTC |
| | | CGAGAACCAGAACAAGGGCAACCAGACCCCCTACGAGTACTTCAACGGCAAGGACAACTCCCGGGAGTGGCAGGAGTTCAAGG |
| | | CCCGGGTGGAGACCTCCCGGTTCCCCCGGTCCAAGAAGCAGCGGATCCTGCTGCAGAAGTTCGACGAGGACGGCTTCAAGGAG |
| | | TGCAACCTGAACGACACCCGGTACGTGAACCGGTTCCTGTGCCAGTTCGTGGCCGACCACATCCTGCTGACCGGCAAGGGCAA |
| | | GCGGCGGGTGTTCGCCTCCAACGGCCAGATCACCAACCTGCTGCGGGGCTTCTGGGGCCTGCGGAAGGTGCGGGCCGAGAACG |
| | | ACCGGCACCACGCCCTGGACGCCGTGGTGGTGGCCTGCTCCACCGTGGCCATGCAGCAGAAGATCACCCGGTTCGTGCGGTAC |
| | | AAGGAGATGAACGCCTTCGACGGCAAGACCATCGACAAGGAGACCGGCAAGGTGCTGCACCAGAAGACCCACTTCCCCCAGCC |
| | | CTGGGAGTTCTTCGCCCAGGAGGTGATGATCCGGGTGTTCGGCAAGCCCGACGGCAAGCCCGAGTTCGAGGAGGCCGACACCC |
| | | CCGAGAAGCTGCGGACCCTGCTGGCCGAGAAGCTGTCCTCCCGGCCCGAGGCCGTGCACGAGTACGTGACCCCCCTGTTCGTG |
| | | TCCCGGGCCCCCAACCGGAAGATGTCCGGCGCCCACAAGGACACCCTGCGGTCCGCCAAGCGGTTCGTGAAGCACAACGAGAA |
| | | GATCTCCGTGAAGCGGGTGTGGCTGACCGAGATCAAGCTGGCCGACCTGGAGAACATGGTGAACTACAAGAACGGCCGGGAGA |
| | | TCGAGCTGTACGAGGCCCTGAAGGCCCGGCTGGAGGCCTACGGCGGCAACGCCAAGCAGGCCTTCGACCCCAAGGACAACCCC |
| | | TTCTACAAGAAGGGCGGCCAGCTGGTGAAGGCCGTGCGGGTGGAGAAGACCCAGGAGTCCGGCGTGCTGCTGAACAAGAAGAA |
| | | CGCCTACACCATCGCCGACAACGGCGACATGGTGCGGGTGGACGTGTTCTGCAAGGTGGACAAGAAGGGCAAGAACCAGTACT |
| | | TCATCGTGCCCATCTACGCCTGGCAGGTGGCCGAGAACATCCTGCCCGACATCGACTGCAAGGGCTACCGGATCGACGACTCC |
| | | TACACCTTCTGCTTCTCCCTGCACAAGTACGACCTGATCGCCTTCCAGAAGGACGAGAAGTCCAAGGTGGAGTTCGCCTACTA |
| | | CATCAACTGCGACTCCTCCAACGGCCGGTTCTACCTGGCCTGGCACGACAAGGGCTCCAAGGAGCAGCAGTTCCGGATCTCCA |
| | | CCCAGAACCTGGTGCTGATCCAGAAGTACCAGGTGAACGAGCTGGGCAAGGAGATCCGGCCCTGCCGGCTGAAGAAGCGGCCC |
| | | CCCGTGCGGUGA |
| Exemplary | 268 | ATGGCCGCCTTCAAGCCCAACCCCATCAACTACATCCTGGGCCTGGCCATCGGCATCGCCTCCGTGGGCTGGGCCATGGTGGA |
| open | | GATCGACGAGGAGGAGAACCCCATCCGGCTGATCGACCTGGGCGTGCGGGTGTTCGAGCGGGCCGAGGTGCCCAAGACCGGCG |
| reading | | ACTCCCTGGCCATGGCCCGGCGGCTGGCCCGGTCCGTGCGGCGGCTGACCCGGCGGCGGGCCCACCGGCTGCTGCGGGCCCGG |
| frame for | | CGGCTGCTGAAGCGGGAGGGCGTGCTGCAGGCCGCCGACTTCGACGAGAACGGCCTGATCAAGTCCCTGCCCAACACCCCCTG |
| Nme2Cas9 | | GCAGCTGCGGGCCGCCGCCCTGGACCGGAAGCTGACCCCCCTGGAGTGGTCCGCCGTGCTGCTGCACCTGATCAAGCACCGGG |
| RuvC | | GCTACCTGTCCCAGCGGAAGAACGAGGGCGAGACCGCCGACAAGGAGCTGGGCGCCCTGCTGAAGGGCGTGGCCAACAACGCC |
| nickase | | CACGCCCTGCAGACCGGCGACTTCCGGACCCCCGCCGAGCTGGCCCTGAACAAGTTCGAGAAGGAGTCCGGCCACATCCGGAA |
| | | CCAGCGGGGCGACTACTCCCACACCTTCTCCCGGAAGGACCTGCAGGCCGAGCTGATCCTGCTGTTCGAGAAGCAGAAGGAGT |
| | | TCGGCAACCCCCACGTGTCCGGCGGCCTGAAGGAGGGCATCGAGACCCTGCTGATGACCCAGCGGCCCGCCCTGTCCGGCGAC |
| | | GCCGTGCAGAAGATGCTGGGCCACTGCACCTTCGAGCCCGCCGAGCCCAAGGCCGCCAAGAACACCTACACCGCCGAGCGGTT |
| | | CATCTGGCTGACCAAGCTGAACAACCTGCGGATCCTGGAGCAGGGCTCCGAGCGGCCCCTGACCGACACCGAGCGGGCCACCC |
| | | TGATGGACGAGCCCTACCGGAAGTCCAAGCTGACCTACGCCCAGGCCCGGAAGCTGCTGGGCCTGGAGGACACCGCCTTCTTC |
| | | AAGGGCCTGCGGTACGGCAAGGACAACGCCGAGGCCTCCACCCTGATGGAGATGAAGGCCTACCACGCCATCTCCCGGGCCCT |
| | | GGAGAAGGAGGGCCTGAAGGACAAGAAGTCCCCCCTGAACCTGTCCTCCGAGCTGCAGGACGAGATCGGCACCGCCTTCTCCC |
| | | TGTTCAAGACCGACGAGGACATCACCGGCCGGCTGAAGGACCGGGTGCAGCCCGAGATCCTGGAGGCCCTGCTGAAGCACATC |
| | | TCCTTCGACAAGTTCGTGCAGATCTCCCTGAAGGCCCTGCGGCGGATCGTGCCCCTGATGGAGCAGGGCAAGCGGTACGACGA |
| | | GGCCTGCGCCGAGATCTACGGCGACCACTACGGCAAGAAGAACACCGAGGAGAAGATCTACCTGCCCCCCATCCCCGCCGACG |
| | | AGATCCGGAACCCCGTGGTGCTGCGGGCCCTGTCCCAGGCCCGGAAGGTGATCAACGGCGTGGTGCGGCGGTACGGCTCCCCC |
| | | GCCCGGATCCACATCGAGACCGCCCGGGAGGTGGGCAAGTCCTTCAAGGACCGGAAGGAGATCGAGAAGCGGCAGGAGGAGAA |
| | | CCGGAAGGACCGGGAGAAGGCCGCCGCCAAGTTCCGGGAGTACTTCCCCAACTTCGTGGGCGAGCCCAAGTCCAAGGACATCC |
| | | TGAAGCTGCGGCTGTACGAGCAGCAGCACGGCAAGTGCCTGTACTCCGGCAAGGAGATCAACCTGGTGCGGCTGAACGAGAAG |
| | | GGCTACGTGGAGATCGACCACGCCCTGCCCTTCTCCCGGACCTGGGACGACTCCTTCAACAACAAGGTGCTGGTGCTGGGCTC |
| | | CGAGAACCAGAACAAGGGCAACCAGACCCCCTACGAGTACTTCAACGGCAAGGACAACTCCCGGGAGTGGCAGGAGTTCAAGG |
| | | CCCGGGTGGAGACCTCCCGGTTCCCCCGGTCCAAGAAGCAGCGGATCCTGCTGCAGAAGTTCGACGAGGACGGCTTCAAGGAG |
| | | TGCAACCTGAACGACACCCGGTACGTGAACCGGTTCCTGTGCCAGTTCGTGGCCGACCACATCCTGCTGACCGGCAAGGGCAA |
| | | GCGGCGGGTGTTCGCCTCCAACGGCCAGATCACCAACCTGCTGCGGGGCTTCTGGGGCCTGCGGAAGGTGCGGGCCGAGAACG |
| | | ACCGGCACCACGCCCTGGACGCCGTGGTGGTGGCCTGCTCCACCGTGGCCATGCAGCAGAAGATCACCCGGTTCGTGCGGTAC |
| | | AAGGAGATGAACGCCTTCGACGGCAAGACCATCGACAAGGAGACCGGCAAGGTGCTGCACCAGAAGACCCACTTCCCCCAGCC |
| | | CTGGGAGTTCTTCGCCCAGGAGGTGATGATCCGGGTGTTCGGCAAGCCCGACGGCAAGCCCGAGTTCGAGGAGGCCGACACCC |
| | | CCGAGAAGCTGCGGACCCTGCTGGCCGAGAAGCTGTCCTCCCGGCCCGAGGCCGTGCACGAGTACGTGACCCCCCTGTTCGTG |
| | | TCCCGGGCCCCCAACCGGAAGATGTCCGGCGCCCACAAGGACACCCTGCGGTCCGCCAAGCGGTTCGTGAAGCACAACGAGAA |
| | | GATCTCCGTGAAGCGGGTGTGGCTGACCGAGATCAAGCTGGCCGACCTGGAGAACATGGTGAACTACAAGAACGGCCGGGAGA |
| | | TCGAGCTGTACGAGGCCCTGAAGGCCCGGCTGGAGGCCTACGGCGGCAACGCCAAGCAGGCCTTCGACCCCAAGGACAACCCC |
| | | TTCTACAAGAAGGGCGGCCAGCTGGTGAAGGCCGTGCGGGTGGAGAAGACCCAGGAGTCCGGCGTGCTGCTGAACAAGAAGAA |
| | | CGCCTACACCATCGCCGACAACGGCGACATGGTGCGGGTGGACGTGTTCTGCAAGGTGGACAAGAAGGGCAAGAACCAGTACT |
| | | TCATCGTGCCCATCTACGCCTGGCAGGTGGCCGAGAACATCCTGCCCGACATCGACTGCAAGGGCTACCGGATCGACGACTCC |
| | | TACACCTTCTGCTTCTCCCTGCACAAGTACGACCTGATCGCCTTCCAGAAGGACGAGAAGTCCAAGGTGGAGTTCGCCTACTA |
| | | CATCAACTGCGACTCCTCCAACGGCCGGTTCTACCTGGCCTGGCACGACAAGGGCTCCAAGGAGCAGCAGTTCCGGATCTCCA |
| | | CCCAGAACCTGGTGCTGATCCAGAAGTACCAGGTGAACGAGCTGGGCAAGGAGATCCGGCCCTGCCGGCTGAAGAAGCGGCCC |
| | | CCCGTGCGGUAA |
| Exemplary | 269 | MAAFKPNPINYILGLDIGIASVGWAMVEIDEEENPIRLIDLGVRVFERAEVPKTGDSLAMARRLARSVRRLTRRRAHRLLRAR |
| amino | | RLLKREGVLQAADFDENGLIKSLPNTPWQLRAAALDRKLTPLEWSAVLLHLIKHRGYLSQRKNEGETADKELGALLKGVANNA |
| acid | | HALQTGDFRTPAELALNKFEKESGHIRNQRGDYSHTFSRKDLQAELILLFEKQKEFGNPHVSGGLKEGIETLLMTQRPALSGD |
| sequence | | AVQKMLGHCTFEPAEPKAAKNTYTAERFIWLTKLNNLRILEQGSERPLTDTERATLMDEPYRKSKLTYAQARKLLGLEDTAFF |
| of | | KGLRYGKDNAEASTLMEMKAYHAISRALEKEGLKDKKSPLNLSSELQDEIGTAFSLEKTDEDITGRLKDRVQPEILEALLKHI |
| Nme2Cas9 | | SFDKFVQISLKALRRIVPLMEQGKRYDEACAEIYGDHYGKKNTEEKIYLPPIPADEIRNPVVLRALSQARKVINGVVRRYGSP |
| HNH | | ARIHIETAREVGKSFKDRKEIEKRQEENRKDREKAAAKFREYFPNFVGEPKSKDILKLRLYEQQHGKCLYSGKEINLVRLNEK |
| nickase | | GYVEIDAALPESRTWDDSFNNKVLVLGSENQNKGNQTPYEYENGKDNSREWQEFKARVETSRFPRSKKQRILLQKFDEDGEKE |
| | | CNLNDTRYVNRFLCQFVADHILLTGKGKRRVFASNGQITNLLRGFWGLRKVRAENDRHHALDAVVVACSTVAMQQKITRFVRY |
| | | KEMNAFDGKTIDKETGKVLHQKTHFPQPWEFFAQEVMIRVFGKPDGKPEFEEADTPEKLRTLLAEKLSSRPEAVHEYVTPLFV |
| | | SRAPNRKMSGAHKDTLRSAKRFVKHNEKISVKRVWLTEIKLADLENMVNYKNGREIELYEALKARLEAYGGNAKQAFDPKDNP |
| | | FYKKGGQLVKAVRVEKTQESGVLLNKKNAYTIADNGDMVRVDVFCKVDKKGKNQYFIVPIYAWQVAENILPDIDCKGYRIDDS |
| | | YTFCFSLHKYDLIAFQKDEKSKVEFAYYINCDSSNGRFYLAWHDKGSKEQQFRISTQNLVLIQKYQVNELGKEIRPCRLKKRP |
| | | PVR |
| Exemplary | 270 | GCTGCTTTTAAGCCTAATCCTATTAATTATATTCTTGGTCTTGATATTGGTATTGCTTCTGTTGGTTGGGCTATGGTTGAGAT |
| coding | | TGATGAGGAGGAGAATCCTATTCGTCTTATTGATCTTGGTGTTCGTGTTTTTGAGCGTGCTGAGGTTCCTAAGACTGGTGATT |
| sequence | | CTCTTGCTATGGCTCGTCGTCTTGCTCGTTCTGTTCGTCGTCTTACTCGTCGTCGTGCTCATCGTCTTCTTCGTGCTCGTCGT |
| encoding | | CTTCTTAAGCGTGAGGGTGTTCTTCAGGCTGCTGATTTTGATGAGAATGGTCTTATTAAGTCTCTTCCTAATACTCCTTGGCA |
| Nme2Cas9 | | GCTTCGTGCTGCTGCTCTTGATCGTAAGCTTACTCCTCTTGAGTGGTCTGCTGTTCTTCTTCATCTTATTAAGCATCGTGGTT |
| HNH | | ATCTTTCTCAGCGTAAGAATGAGGGTGAGACTGCTGATAAGGAGCTTGGTGCTCTTCTTAAGGGTGTTGCTAATAATGCTCAT |
| nickase | | GCTCTTCAGACTGGTGATTTTCGTACTCCTGCTGAGCTTGCTCTTAATAAGTTTGAGAAGGAGTCTGGTCATATTCGTAATCA |
| | | GCGTGGTGATTATTCTCATACTTTTTCTCGTAAGGATCTTCAGGCTGAGCTTATTCTTCTTTTTGAGAAGCAGAAGGAGTTTG |
| | | GTAATCCTCATGTTTCTGGTGGTCTTAAGGAGGGTATTGAGACTCTTCTTATGACTCAGCGTCCTGCTCTTTCTGGTGATGCT |
| | | GTTCAGAAGATGCTTGGTCATTGTACTTTTGAGCCTGCTGAGCCTAAGGCTGCTAAGAATACTTATACTGCTGAGCGTTTTAT |
| | | TTGGCTTACTAAGCTTAATAATCTTCGTATTCTTGAGCAGGGTTCTGAGCGTCCTCTTACTGATACTGAGCGTGCTACTCTTA |
| | | TGGATGAGCCTTATCGTAAGTCTAAGCTTACTTATGCTCAGGCTCGTAAGCTTCTTGGTCTTGAGGATACTGCTTTTTTTAAG |
| | | GGTCTTCGTTATGGTAAGGATAATGCTGAGGCTTCTACTCTTATGGAGATGAAGGCTTATCATGCTATTTCTCGTGCTCTTGA |
| | | GAAGGAGGGTCTTAAGGATAAGAAGTCTCCTCTTAATCTTTCTTCTGAGCTTCAGGATGAGATTGGTACTGCTTTTTCTCTTT |
| | | TTAAGACTGATGAGGATATTACTGGTCGTCTTAAGGATCGTGTTCAGCCTGAGATTCTTGAGGCTCTTCTTAAGCATATTTCT |
| | | TTTGATAAGTTTGTTCAGATTTCTCTTAAGGCTCTTCGTCGTATTGTTCCTCTTATGGAGCAGGGTAAGCGTTATGATGAGGC |
| | | TTGTGCTGAGATTTATGGTGATCATTATGGTAAGAAGAATACTGAGGAGAAGATTTATCTTCCTCCTATTCCTGCTGATGAGA |
| | | TTCGTAATCCTGTTGTTCTTCGTGCTCTTTCTCAGGCTCGTAAGGTTATTAATGGTGTTGTTCGTCGTTATGGTTCTCCTGCT |
| | | CGTATTCATATTGAGACTGCTCGTGAGGTTGGTAAGTCTTTTAAGGATCGTAAGGAGATTGAGAAGCGTCAGGAGGAGAATCG |
| | | TAAGGATCGTGAGAAGGCTGCTGCTAAGTTTCGTGAGTATTTTCCTAATTTTGTTGGTGAGCCTAAGTCTAAGGATATTCTTA |
| | | AGCTTCGTCTTTATGAGCAGCAGCATGGTAAGTGTCTTTATTCTGGTAAGGAGATTAATCTTGTTCGTCTTAATGAGAAGGGT |
| | | TATGTTGAGATTGATGCTGCTCTTCCTTTTTCTCGTACTTGGGATGATTCTTTTAATAATAAGGTTCTTGTTCTTGGTTCTGA |
| | | GAATCAGAATAAGGGTAATCAGACTCCTTATGAGTATTTTAATGGTAAGGATAATTCTCGTGAGTGGCAGGAGTTTAAGGCTC |
| | | GTGTTGAGACTTCTCGTTTTCCTCGTTCTAAGAAGCAGCGTATTCTTCTTCAGAAGTTTGATGAGGATGGTTTTAAGGAGTGT |
| | | AATCTTAATGATACTCGTTATGTTAATCGTTTTCTTTGTCAGTTTGTTGCTGATCATATTCTTCTTACTGGTAAGGGTAAGCG |
| | | TCGTGTTTTTGCTTCTAATGGTCAGATTACTAATCTTCTTCGTGGTTTTTGGGGTCTTCGTAAGGTTCGTGCTGAGAATGATC |
| | | GTCATCATGCTCTTGATGCTGTTGTTGTTGCTTGTTCTACTGTTGCTATGCAGCAGAAGATTACTCGTTTTGTTCGTTATAAG |
| | | GAGATGAATGCTTTTGATGGTAAGACTATTGATAAGGAGACTGGTAAGGTTCTTCATCAGAAGACTCATTTTCCTCAGCCTTG |
| | | GGAGTTTTTTGCTCAGGAGGTTATGATTCGTGTTTTTGGTAAGCCTGATGGTAAGCCTGAGTTTGAGGAGGCTGATACTCCTG |
| | | AGAAGCTTCGTACTCTTCTTGCTGAGAAGCTTTCTTCTCGTCCTGAGGCTGTTCATGAGTATGTTACTCCTCTTTTTGTTTCT |
| | | CGTGCTCCTAATCGTAAGATGTCTGGTGCTCATAAGGATACTCTTCGTTCTGCTAAGCGTTTTGTTAAGCATAATGAGAAGAT |
| | | TTCTGTTAAGCGTGTTTGGCTTACTGAGATTAAGCTTGCTGATCTTGAGAATATGGTTAATTATAAGAATGGTCGTGAGATTG |
| | | AGCTTTATGAGGCTCTTAAGGCTCGTCTTGAGGCTTATGGTGGTAATGCTAAGCAGGCTTTTGATCCTAAGGATAATCCTTTT |
| | | TATAAGAAGGGTGGTCAGCTTGTTAAGGCTGTTCGTGTTGAGAAGACTCAGGAGTCTGGTGTTCTTCTTAATAAGAAGAATGC |
| | | TTATACTATTGCTGATAATGGTGATATGGTTCGTGTTGATGTTTTTTGTAAGGTTGATAAGAAGGGTAAGAATCAGTATTTTA |
| | | TTGTTCCTATTTATGCTTGGCAGGTTGCTGAGAATATTCTTCCTGATATTGATTGTAAGGGTTATCGTATTGATGATTCTTAT |
| | | ACTTTTTGTTTTTCTCTTCATAAGTATGATCTTATTGCTTTTCAGAAGGATGAGAAGTCTAAGGTTGAGTTTGCTTATTATAT |
| | | TAATTGTGATTCTTCTAATGGTCGTTTTTATCTTGCTTGGCATGATAAGGGTTCTAAGGAGCAGCAGTTTCGTATTTCTACTC |
| | | AGAATCTTGTTCTTATTCAGAAGTATCAGGTTAATGAGCTTGGTAAGGAGATTCGTCCTTGTCGTCTTAAGAAGCGTCCTCCT |
| | | GTTCGT |
| Exemplary | 271 | GCCGCCTTCAAGCCCAACCCCATCAACTACATCCTGGGCCTGGACATCGGCATCGCCTCCGTGGGCTGGGCCATGGTGGAGAT |
| coding | | CGACGAGGAGGAGAACCCCATCCGGCTGATCGACCTGGGCGTGCGGGTGTTCGAGCGGGCCGAGGTGCCCAAGACCGGCGACT |
| sequence | | CCCTGGCCATGGCCCGGCGGCTGGCCCGGTCCGTGCGGCGGCTGACCCGGCGGCGGGCCCACCGGCTGCTGCGGGCCCGGCGG |
| encoding | | CTGCTGAAGCGGGAGGGCGTGCTGCAGGCCGCCGACTTCGACGAGAACGGCCTGATCAAGTCCCTGCCCAACACCCCCTGGCA |
| Nme2Cas9 | | GCTGCGGGCCGCCGCCCTGGACCGGAAGCTGACCCCCCTGGAGTGGTCCGCCGTGCTGCTGCACCTGATCAAGCACCGGGGCT |
| HNH | | ACCTGTCCCAGCGGAAGAACGAGGGCGAGACCGCCGACAAGGAGCTGGGCGCCCTGCTGAAGGGCGTGGCCAACAACGCCCAC |
| nickase | | GCCCTGCAGACCGGCGACTTCCGGACCCCCGCCGAGCTGGCCCTGAACAAGTTCGAGAAGGAGTCCGGCCACATCCGGAACCA |
| | | GCGGGGCGACTACTCCCACACCTTCTCCCGGAAGGACCTGCAGGCCGAGCTGATCCTGCTGTTCGAGAAGCAGAAGGAGTTCG |
| | | GCAACCCCCACGTGTCCGGCGGCCTGAAGGAGGGCATCGAGACCCTGCTGATGACCCAGCGGCCCGCCCTGTCCGGCGACGCC |
| | | GTGCAGAAGATGCTGGGCCACTGCACCTTCGAGCCCGCCGAGCCCAAGGCCGCCAAGAACACCTACACCGCCGAGCGGTTCAT |
| | | CTGGCTGACCAAGCTGAACAACCTGCGGATCCTGGAGCAGGGCTCCGAGCGGCCCCTGACCGACACCGAGCGGGCCACCCTGA |
| | | TGGACGAGCCCTACCGGAAGTCCAAGCTGACCTACGCCCAGGCCCGGAAGCTGCTGGGCCTGGAGGACACCGCCTTCTTCAAG |
| | | GGCCTGCGGTACGGCAAGGACAACGCCGAGGCCTCCACCCTGATGGAGATGAAGGCCTACCACGCCATCTCCCGGGCCCTGGA |
| | | GAAGGAGGGCCTGAAGGACAAGAAGTCCCCCCTGAACCTGTCCTCCGAGCTGCAGGACGAGATCGGCACCGCCTTCTCCCTGT |
| | | TCAAGACCGACGAGGACATCACCGGCCGGCTGAAGGACCGGGTGCAGCCCGAGATCCTGGAGGCCCTGCTGAAGCACATCTCC |
| | | TTCGACAAGTTCGTGCAGATCTCCCTGAAGGCCCTGCGGCGGATCGTGCCCCTGATGGAGCAGGGCAAGCGGTACGACGAGGC |
| | | CTGCGCCGAGATCTACGGCGACCACTACGGCAAGAAGAACACCGAGGAGAAGATCTACCTGCCCCCCATCCCCGCCGACGAGA |
| | | TCCGGAACCCCGTGGTGCTGCGGGCCCTGTCCCAGGCCCGGAAGGTGATCAACGGCGTGGTGCGGCGGTACGGCTCCCCCGCC |
| | | CGGATCCACATCGAGACCGCCCGGGAGGTGGGCAAGTCCTTCAAGGACCGGAAGGAGATCGAGAAGCGGCAGGAGGAGAACCG |
| | | GAAGGACCGGGAGAAGGCCGCCGCCAAGTTCCGGGAGTACTTCCCCAACTTCGTGGGCGAGCCCAAGTCCAAGGACATCCTGA |
| | | AGCTGCGGCTGTACGAGCAGCAGCACGGCAAGTGCCTGTACTCCGGCAAGGAGATCAACCTGGTGCGGCTGAACGAGAAGGGC |
| | | TACGTGGAGATCGACGCCGCCCTGCCCTTCTCCCGGACCTGGGACGACTCCTTCAACAACAAGGTGCTGGTGCTGGGCTCCGA |
| | | GAACCAGAACAAGGGCAACCAGACCCCCTACGAGTACTTCAACGGCAAGGACAACTCCCGGGAGTGGCAGGAGTTCAAGGCCC |
| | | GGGTGGAGACCTCCCGGTTCCCCCGGTCCAAGAAGCAGCGGATCCTGCTGCAGAAGTTCGACGAGGACGGCTTCAAGGAGTGC |
| | | AACCTGAACGACACCCGGTACGTGAACCGGTTCCTGTGCCAGTTCGTGGCCGACCACATCCTGCTGACCGGCAAGGGCAAGCG |
| | | GCGGGTGTTCGCCTCCAACGGCCAGATCACCAACCTGCTGCGGGGCTTCTGGGGCCTGCGGAAGGTGCGGGCCGAGAACGACC |
| | | GGCACCACGCCCTGGACGCCGTGGTGGTGGCCTGCTCCACCGTGGCCATGCAGCAGAAGATCACCCGGTTCGTGCGGTACAAG |
| | | GAGATGAACGCCTTCGACGGCAAGACCATCGACAAGGAGACCGGCAAGGTGCTGCACCAGAAGACCCACTTCCCCCAGCCCTG |
| | | GGAGTTCTTCGCCCAGGAGGTGATGATCCGGGTGTTCGGCAAGCCCGACGGCAAGCCCGAGTTCGAGGAGGCCGACACCCCCG |
| | | AGAAGCTGCGGACCCTGCTGGCCGAGAAGCTGTCCTCCCGGCCCGAGGCCGTGCACGAGTACGTGACCCCCCTGTTCGTGTCC |
| | | CGGGCCCCCAACCGGAAGATGTCCGGCGCCCACAAGGACACCCTGCGGTCCGCCAAGCGGTTCGTGAAGCACAACGAGAAGAT |
| | | CTCCGTGAAGCGGGTGTGGCTGACCGAGATCAAGCTGGCCGACCTGGAGAACATGGTGAACTACAAGAACGGCCGGGAGATCG |
| | | AGCTGTACGAGGCCCTGAAGGCCCGGCTGGAGGCCTACGGCGGCAACGCCAAGCAGGCCTTCGACCCCAAGGACAACCCCTTC |
| | | TACAAGAAGGGCGGCCAGCTGGTGAAGGCCGTGCGGGTGGAGAAGACCCAGGAGTCCGGCGTGCTGCTGAACAAGAAGAACGC |
| | | CTACACCATCGCCGACAACGGCGACATGGTGCGGGTGGACGTGTTCTGCAAGGTGGACAAGAAGGGCAAGAACCAGTACTTCA |
| | | TCGTGCCCATCTACGCCTGGCAGGTGGCCGAGAACATCCTGCCCGACATCGACTGCAAGGGCTACCGGATCGACGACTCCTAC |
| | | ACCTTCTGCTTCTCCCTGCACAAGTACGACCTGATCGCCTTCCAGAAGGACGAGAAGTCCAAGGTGGAGTTCGCCTACTACAT |
| | | CAACTGCGACTCCTCCAACGGCCGGTTCTACCTGGCCTGGCACGACAAGGGCTCCAAGGAGCAGCAGTTCCGGATCTCCACCC |
| | | AGAACCTGGTGCTGATCCAGAAGTACCAGGTGAACGAGCTGGGCAAGGAGATCCGGCCCTGCCGGCTGAAGAAGCGGCCCCCC |
| | | GTGCGG |
| Exemplary | 272 | GCAGCATTCAAACCAAACCCAATCAACTACATCCTAGGACTAGACATCGGAATCGCATCAGTAGGATGAGCAATGGTAGAAAT |
| coding | | CGACGAAGAAGAAAACCCAATCCGACTAATCGACCTAGGAGTACGAGTATTCGAACGAGCAGAAGTACCAAAAACAGGAGACT |
| sequence | | CACTAGCAATGGCACGACGACTAGCACGATCAGTACGACGACTAACACGACGACGAGCACACCGACTACTACGAGCACGACGA |
| encoding | | CTACTAAAACGAGAAGGAGTACTACAAGCAGCAGACTTCGACGAAAACGGACTAATCAAATCACTACCAAACACACCATGACA |
| Nme2Cas9 | | ACTACGAGCAGCAGCACTAGACCGAAAACTAACACCACTAGAATGATCAGCAGTACTACTACACCTAATCAAACACCGAGGAT |
| HNH | | ACCTATCACAACGAAAAAACGAAGGAGAAACAGCAGACAAAGAACTAGGAGCACTACTAAAAGGAGTAGCAAACAACGCACAC |
| nickase | | GCACTACAAACAGGAGACTTCCGAACACCAGCAGAACTAGCACTAAACAAATTCGAAAAAGAATCAGGACACATCCGAAACCA |
| | | ACGAGGAGACTACTCACACACATTCTCACGAAAAGACCTACAAGCAGAACTAATCCTACTATTCGAAAAACAAAAAGAATTCG |
| | | GAAACCCACACGTATCAGGAGGACTAAAAGAAGGAATCGAAACACTACTAATGACACAACGACCAGCACTATCAGGAGACGCA |
| | | GTACAAAAAATGCTAGGACACTGCACATTCGAACCAGCAGAACCAAAAGCAGCAAAAAACACATACACAGCAGAACGATTCAT |
| | | CTGACTAACAAAACTAAACAACCTACGAATCCTAGAACAAGGATCAGAACGACCACTAACAGACACAGAACGAGCAACACTAA |
| | | TGGACGAACCATACCGAAAATCAAAACTAACATACGCACAAGCACGAAAACTACTAGGACTAGAAGACACAGCATTCTTCAAA |
| | | GGACTACGATACGGAAAAGACAACGCAGAAGCATCAACACTAATGGAAATGAAAGCATACCACGCAATCTCACGAGCACTAGA |
| | | AAAAGAAGGACTAAAAGACAAAAAATCACCACTAAACCTATCATCAGAACTACAAGACGAAATCGGAACAGCATTCTCACTAT |
| | | TCAAAACAGACGAAGACATCACAGGACGACTAAAAGACCGAGTACAACCAGAAATCCTAGAAGCACTACTAAAACACATCTCA |
| | | TTCGACAAATTCGTACAAATCTCACTAAAAGCACTACGACGAATCGTACCACTAATGGAACAAGGAAAACGATACGACGAAGC |
| | | ATGCGCAGAAATCTACGGAGACCACTACGGAAAAAAAAACACAGAAGAAAAAATCTACCTACCACCAATCCCAGCAGACGAAA |
| | | TCCGAAACCCAGTAGTACTACGAGCACTATCACAAGCACGAAAAGTAATCAACGGAGTAGTACGACGATACGGATCACCAGCA |
| | | CGAATCCACATCGAAACAGCACGAGAAGTAGGAAAATCATTCAAAGACCGAAAAGAAATCGAAAAACGACAAGAAGAAAACCG |
| | | AAAAGACCGAGAAAAAGCAGCAGCAAAATTCCGAGAATACTTCCCAAACTTCGTAGGAGAACCAAAATCAAAAGACATCCTAA |
| | | AACTACGACTATACGAACAACAACACGGAAAATGCCTATACTCAGGAAAAGAAATCAACCTAGTACGACTAAACGAAAAAGGA |
| | | TACGTAGAAATCGACGCAGCACTACCATTCTCACGAACATGAGACGACTCATTCAACAACAAAGTACTAGTACTAGGATCAGA |
| | | AAACCAAAACAAAGGAAACCAAACACCATACGAATACTTCAACGGAAAAGACAACTCACGAGAATGACAAGAATTCAAAGCAC |
| | | GAGTAGAAACATCACGATTCCCACGATCAAAAAAACAACGAATCCTACTACAAAAATTCGACGAAGACGGATTCAAAGAATGC |
| | | AACCTAAACGACACACGATACGTAAACCGATTCCTATGCCAATTCGTAGCAGACCACATCCTACTAACAGGAAAAGGAAAACG |
| | | ACGAGTATTCGCATCAAACGGACAAATCACAAACCTACTACGAGGATTCTGAGGACTACGAAAAGTACGAGCAGAAAACGACC |
| | | GACACCACGCACTAGACGCAGTAGTAGTAGCATGCTCAACAGTAGCAATGCAACAAAAAATCACACGATTCGTACGATACAAA |
| | | GAAATGAACGCATTCGACGGAAAAACAATCGACAAAGAAACAGGAAAAGTACTACACCAAAAAACACACTTCCCACAACCATG |
| | | AGAATTCTTCGCACAAGAAGTAATGATCCGAGTATTCGGAAAACCAGACGGAAAACCAGAATTCGAAGAAGCAGACACACCAG |
| | | AAAAACTACGAACACTACTAGCAGAAAAACTATCATCACGACCAGAAGCAGTACACGAATACGTAACACCACTATTCGTATCA |
| | | CGAGCACCAAACCGAAAAATGTCAGGAGCACACAAAGACACACTACGATCAGCAAAACGATTCGTAAAACACAACGAAAAAAT |
| | | CTCAGTAAAACGAGTATGACTAACAGAAATCAAACTAGCAGACCTAGAAAACATGGTAAACTACAAAAACGGACGAGAAATCG |
| | | AACTATACGAAGCACTAAAAGCACGACTAGAAGCATACGGAGGAAACGCAAAACAAGCATTCGACCCAAAAGACAACCCATTC |
| | | TACAAAAAAGGAGGACAACTAGTAAAAGCAGTACGAGTAGAAAAAACACAAGAATCAGGAGTACTACTAAACAAAAAAAACGC |
| | | ATACACAATCGCAGACAACGGAGACATGGTACGAGTAGACGTATTCTGCAAAGTAGACAAAAAAGGAAAAAACCAATACTTCA |
| | | TCGTACCAATCTACGCATGACAAGTAGCAGAAAACATCCTACCAGACATCGACTGCAAAGGATACCGAATCGACGACTCATAC |
| | | ACATTCTGCTTCTCACTACACAAATACGACCTAATCGCATTCCAAAAAGACGAAAAATCAAAAGTAGAATTCGCATACTACAT |
| | | CAACTGCGACTCATCAAACGGACGATTCTACCTAGCATGACACGACAAAGGATCAAAAGAACAACAATTCCGAATCTCAACAC |
| | | AAAACCTAGTACTAATCCAAAAATACCAAGTAAACGAACTAGGAAAAGAAATCCGACCATGCCGACTAAAAAAACGACCACCA |
| | | GTACGA |
| Exemplary | 273 | ATGGCTGCTTTTAAGCCTAATCCTATTAATTATATTCTTGGTCTTGATATTGGTATTGCTTCTGTTGGTTGGGCTATGGTTGA |
| open | | GATTGATGAGGAGGAGAATCCTATTCGTCTTATTGATCTTGGTGTTCGTGTTTTTGAGCGTGCTGAGGTTCCTAAGACTGGTG |
| reading | | ATTCTCTTGCTATGGCTCGTCGTCTTGCTCGTTCTGTTCGTCGTCTTACTCGTCGTCGTGCTCATCGTCTTCTTCGTGCTCGT |
| frame for | | CGTCTTCTTAAGCGTGAGGGTGTTCTTCAGGCTGCTGATTTTGATGAGAATGGTCTTATTAAGTCTCTTCCTAATACTCCTTG |
| Nme2Cas9 | | GCAGCTTCGTGCTGCTGCTCTTGATCGTAAGCTTACTCCTCTTGAGTGGTCTGCTGTTCTTCTTCATCTTATTAAGCATCGTG |
| HNH | | GTTATCTTTCTCAGCGTAAGAATGAGGGTGAGACTGCTGATAAGGAGCTTGGTGCTCTTCTTAAGGGTGTTGCTAATAATGCT |
| nickase | | CATGCTCTTCAGACTGGTGATTTTCGTACTCCTGCTGAGCTTGCTCTTAATAAGTTTGAGAAGGAGTCTGGTCATATTCGTAA |
| | | TCAGCGTGGTGATTATTCTCATACTTTTTCTCGTAAGGATCTTCAGGCTGAGCTTATTCTTCTTTTTGAGAAGCAGAAGGAGT |
| | | TTGGTAATCCTCATGTTTCTGGTGGTCTTAAGGAGGGTATTGAGACTCTTCTTATGACTCAGCGTCCTGCTCTTTCTGGTGAT |
| | | GCTGTTCAGAAGATGCTTGGTCATTGTACTTTTGAGCCTGCTGAGCCTAAGGCTGCTAAGAATACTTATACTGCTGAGCGTTT |
| | | TATTTGGCTTACTAAGCTTAATAATCTTCGTATTCTTGAGCAGGGTTCTGAGCGTCCTCTTACTGATACTGAGCGTGCTACTC |
| | | TTATGGATGAGCCTTATCGTAAGTCTAAGCTTACTTATGCTCAGGCTCGTAAGCTTCTTGGTCTTGAGGATACTGCTTTTTTT |
| | | AAGGGTCTTCGTTATGGTAAGGATAATGCTGAGGCTTCTACTCTTATGGAGATGAAGGCTTATCATGCTATTTCTCGTGCTCT |
| | | TGAGAAGGAGGGTCTTAAGGATAAGAAGTCTCCTCTTAATCTTTCTTCTGAGCTTCAGGATGAGATTGGTACTGCTTTTTCTC |
| | | TTTTTAAGACTGATGAGGATATTACTGGTCGTCTTAAGGATCGTGTTCAGCCTGAGATTCTTGAGGCTCTTCTTAAGCATATT |
| | | TCTTTTGATAAGTTTGTTCAGATTTCTCTTAAGGCTCTTCGTCGTATTGTTCCTCTTATGGAGCAGGGTAAGCGTTATGATGA |
| | | GGCTTGTGCTGAGATTTATGGTGATCATTATGGTAAGAAGAATACTGAGGAGAAGATTTATCTTCCTCCTATTCCTGCTGATG |
| | | AGATTCGTAATCCTGTTGTTCTTCGTGCTCTTTCTCAGGCTCGTAAGGTTATTAATGGTGTTGTTCGTCGTTATGGTTCTCCT |
| | | GCTCGTATTCATATTGAGACTGCTCGTGAGGTTGGTAAGTCTTTTAAGGATCGTAAGGAGATTGAGAAGCGTCAGGAGGAGAA |
| | | TCGTAAGGATCGTGAGAAGGCTGCTGCTAAGTTTCGTGAGTATTTTCCTAATTTTGTTGGTGAGCCTAAGTCTAAGGATATTC |
| | | TTAAGCTTCGTCTTTATGAGCAGCAGCATGGTAAGTGTCTTTATTCTGGTAAGGAGATTAATCTTGTTCGTCTTAATGAGAAG |
| | | GGTTATGTTGAGATTGATGCTGCTCTTCCTTTTTCTCGTACTTGGGATGATTCTTTTAATAATAAGGTTCTTGTTCTTGGTTC |
| | | TGAGAATCAGAATAAGGGTAATCAGACTCCTTATGAGTATTTTAATGGTAAGGATAATTCTCGTGAGTGGCAGGAGTTTAAGG |
| | | CTCGTGTTGAGACTTCTCGTTTTCCTCGTTCTAAGAAGCAGCGTATTCTTCTTCAGAAGTTTGATGAGGATGGTTTTAAGGAG |
| | | TGTAATCTTAATGATACTCGTTATGTTAATCGTTTTCTTTGTCAGTTTGTTGCTGATCATATTCTTCTTACTGGTAAGGGTAA |
| | | GCGTCGTGTTTTTGCTTCTAATGGTCAGATTACTAATCTTCTTCGTGGTTTTTGGGGTCTTCGTAAGGTTCGTGCTGAGAATG |
| | | ATCGTCATCATGCTCTTGATGCTGTTGTTGTTGCTTGTTCTACTGTTGCTATGCAGCAGAAGATTACTCGTTTTGTTCGTTAT |
| | | AAGGAGATGAATGCTTTTGATGGTAAGACTATTGATAAGGAGACTGGTAAGGTTCTTCATCAGAAGACTCATTTTCCTCAGCC |
| | | TTGGGAGTTTTTTGCTCAGGAGGTTATGATTCGTGTTTTTGGTAAGCCTGATGGTAAGCCTGAGTTTGAGGAGGCTGATACTC |
| | | CTGAGAAGCTTCGTACTCTTCTTGCTGAGAAGCTTTCTTCTCGTCCTGAGGCTGTTCATGAGTATGTTACTCCTCTTTTTGTT |
| | | TCTCGTGCTCCTAATCGTAAGATGTCTGGTGCTCATAAGGATACTCTTCGTTCTGCTAAGCGTTTTGTTAAGCATAATGAGAA |
| | | GATTTCTGTTAAGCGTGTTTGGCTTACTGAGATTAAGCTTGCTGATCTTGAGAATATGGTTAATTATAAGAATGGTCGTGAGA |
| | | TTGAGCTTTATGAGGCTCTTAAGGCTCGTCTTGAGGCTTATGGTGGTAATGCTAAGCAGGCTTTTGATCCTAAGGATAATCCT |
| | | TTTTATAAGAAGGGTGGTCAGCTTGTTAAGGCTGTTCGTGTTGAGAAGACTCAGGAGTCTGGTGTTCTTCTTAATAAGAAGAA |
| | | TGCTTATACTATTGCTGATAATGGTGATATGGTTCGTGTTGATGTTTTTTGTAAGGTTGATAAGAAGGGTAAGAATCAGTATT |
| | | TTATTGTTCCTATTTATGCTTGGCAGGTTGCTGAGAATATTCTTCCTGATATTGATTGTAAGGGTTATCGTATTGATGATTCT |
| | | TATACTTTTTGTTTTTCTCTTCATAAGTATGATCTTATTGCTTTTCAGAAGGATGAGAAGTCTAAGGTTGAGTTTGCTTATTA |
| | | TATTAATTGTGATTCTTCTAATGGTCGTTTTTATCTTGCTTGGCATGATAAGGGTTCTAAGGAGCAGCAGTTTCGTATTTCTA |
| | | CTCAGAATCTTGTTCTTATTCAGAAGTATCAGGTTAATGAGCTTGGTAAGGAGATTCGTCCTTGTCGTCTTAAGAAGCGTCCT |
| | | CCTGTTCGTUGA |
| Exemplary | 274 | ATGGCCGCCTTCAAGCCCAACCCCATCAACTACATCCTGGGCCTGGACATCGGCATCGCCTCCGTGGGCTGGGCCATGGTGGA |
| open | | GATCGACGAGGAGGAGAACCCCATCCGGCTGATCGACCTGGGCGTGCGGGTGTTCGAGCGGGCCGAGGTGCCCAAGACCGGCG |
| reading | | ACTCCCTGGCCATGGCCCGGCGGCTGGCCCGGTCCGTGCGGCGGCTGACCCGGCGGCGGGCCCACCGGCTGCTGCGGGCCCGG |
| frame for | | CGGCTGCTGAAGCGGGAGGGCGTGCTGCAGGCCGCCGACTTCGACGAGAACGGCCTGATCAAGTCCCTGCCCAACACCCCCTG |
| Nme2Cas9 | | GCAGCTGCGGGCCGCCGCCCTGGACCGGAAGCTGACCCCCCTGGAGTGGTCCGCCGTGCTGCTGCACCTGATCAAGCACCGGG |
| HNH | | GCTACCTGTCCCAGCGGAAGAACGAGGGCGAGACCGCCGACAAGGAGCTGGGCGCCCTGCTGAAGGGCGTGGCCAACAACGCC |
| nickase | | CACGCCCTGCAGACCGGCGACTTCCGGACCCCCGCCGAGCTGGCCCTGAACAAGTTCGAGAAGGAGTCCGGCCACATCCGGAA |
| | | CCAGCGGGGCGACTACTCCCACACCTTCTCCCGGAAGGACCTGCAGGCCGAGCTGATCCTGCTGTTCGAGAAGCAGAAGGAGT |
| | | TCGGCAACCCCCACGTGTCCGGCGGCCTGAAGGAGGGCATCGAGACCCTGCTGATGACCCAGCGGCCCGCCCTGTCCGGCGAC |
| | | GCCGTGCAGAAGATGCTGGGCCACTGCACCTTCGAGCCCGCCGAGCCCAAGGCCGCCAAGAACACCTACACCGCCGAGCGGTT |
| | | CATCTGGCTGACCAAGCTGAACAACCTGCGGATCCTGGAGCAGGGCTCCGAGCGGCCCCTGACCGACACCGAGCGGGCCACCC |
| | | TGATGGACGAGCCCTACCGGAAGTCCAAGCTGACCTACGCCCAGGCCCGGAAGCTGCTGGGCCTGGAGGACACCGCCTTCTTC |
| | | AAGGGCCTGCGGTACGGCAAGGACAACGCCGAGGCCTCCACCCTGATGGAGATGAAGGCCTACCACGCCATCTCCCGGGCCCT |
| | | GGAGAAGGAGGGCCTGAAGGACAAGAAGTCCCCCCTGAACCTGTCCTCCGAGCTGCAGGACGAGATCGGCACCGCCTTCTCCC |
| | | TGTTCAAGACCGACGAGGACATCACCGGCCGGCTGAAGGACCGGGTGCAGCCCGAGATCCTGGAGGCCCTGCTGAAGCACATC |
| | | TCCTTCGACAAGTTCGTGCAGATCTCCCTGAAGGCCCTGCGGCGGATCGTGCCCCTGATGGAGCAGGGCAAGCGGTACGACGA |
| | | GGCCTGCGCCGAGATCTACGGCGACCACTACGGCAAGAAGAACACCGAGGAGAAGATCTACCTGCCCCCCATCCCCGCCGACG |
| | | AGATCCGGAACCCCGTGGTGCTGCGGGCCCTGTCCCAGGCCCGGAAGGTGATCAACGGCGTGGTGCGGCGGTACGGCTCCCCC |
| | | GCCCGGATCCACATCGAGACCGCCCGGGAGGTGGGCAAGTCCTTCAAGGACCGGAAGGAGATCGAGAAGCGGCAGGAGGAGAA |
| | | CCGGAAGGACCGGGAGAAGGCCGCCGCCAAGTTCCGGGAGTACTTCCCCAACTTCGTGGGCGAGCCCAAGTCCAAGGACATCC |
| | | TGAAGCTGCGGCTGTACGAGCAGCAGCACGGCAAGTGCCTGTACTCCGGCAAGGAGATCAACCTGGTGCGGCTGAACGAGAAG |
| | | GGCTACGTGGAGATCGACGCCGCCCTGCCCTTCTCCCGGACCTGGGACGACTCCTTCAACAACAAGGTGCTGGTGCTGGGCTC |
| | | CGAGAACCAGAACAAGGGCAACCAGACCCCCTACGAGTACTTCAACGGCAAGGACAACTCCCGGGAGTGGCAGGAGTTCAAGG |
| | | CCCGGGTGGAGACCTCCCGGTTCCCCCGGTCCAAGAAGCAGCGGATCCTGCTGCAGAAGTTCGACGAGGACGGCTTCAAGGAG |
| | | TGCAACCTGAACGACACCCGGTACGTGAACCGGTTCCTGTGCCAGTTCGTGGCCGACCACATCCTGCTGACCGGCAAGGGCAA |
| | | GCGGCGGGTGTTCGCCTCCAACGGCCAGATCACCAACCTGCTGCGGGGCTTCTGGGGCCTGCGGAAGGTGCGGGCCGAGAACG |
| | | ACCGGCACCACGCCCTGGACGCCGTGGTGGTGGCCTGCTCCACCGTGGCCATGCAGCAGAAGATCACCCGGTTCGTGCGGTAC |
| | | AAGGAGATGAACGCCTTCGACGGCAAGACCATCGACAAGGAGACCGGCAAGGTGCTGCACCAGAAGACCCACTTCCCCCAGCC |
| | | CTGGGAGTTCTTCGCCCAGGAGGTGATGATCCGGGTGTTCGGCAAGCCCGACGGCAAGCCCGAGTTCGAGGAGGCCGACACCC |
| | | CCGAGAAGCTGCGGACCCTGCTGGCCGAGAAGCTGTCCTCCCGGCCCGAGGCCGTGCACGAGTACGTGACCCCCCTGTTCGTG |
| | | TCCCGGGCCCCCAACCGGAAGATGTCCGGCGCCCACAAGGACACCCTGCGGTCCGCCAAGCGGTTCGTGAAGCACAACGAGAA |
| | | GATCTCCGTGAAGCGGGTGTGGCTGACCGAGATCAAGCTGGCCGACCTGGAGAACATGGTGAACTACAAGAACGGCCGGGAGA |
| | | TCGAGCTGTACGAGGCCCTGAAGGCCCGGCTGGAGGCCTACGGCGGCAACGCCAAGCAGGCCTTCGACCCCAAGGACAACCCC |
| | | TTCTACAAGAAGGGCGGCCAGCTGGTGAAGGCCGTGCGGGTGGAGAAGACCCAGGAGTCCGGCGTGCTGCTGAACAAGAAGAA |
| | | CGCCTACACCATCGCCGACAACGGCGACATGGTGCGGGTGGACGTGTTCTGCAAGGTGGACAAGAAGGGCAAGAACCAGTACT |
| | | TCATCGTGCCCATCTACGCCTGGCAGGTGGCCGAGAACATCCTGCCCGACATCGACTGCAAGGGCTACCGGATCGACGACTCC |
| | | TACACCTTCTGCTTCTCCCTGCACAAGTACGACCTGATCGCCTTCCAGAAGGACGAGAAGTCCAAGGTGGAGTTCGCCTACTA |
| | | CATCAACTGCGACTCCTCCAACGGCCGGTTCTACCTGGCCTGGCACGACAAGGGCTCCAAGGAGCAGCAGTTCCGGATCTCCA |
| | | CCCAGAACCTGGTGCTGATCCAGAAGTACCAGGTGAACGAGCTGGGCAAGGAGATCCGGCCCTGCCGGCTGAAGAAGCGGCCC |
| | | CCCGTGCGGUGA |
| Exemplary | 275 | ATGGCAGCATTCAAACCAAACCCAATCAACTACATCCTAGGACTAGACATCGGAATCGCATCAGTAGGATGAGCAATGGTAGA |
| open | | AATCGACGAAGAAGAAAACCCAATCCGACTAATCGACCTAGGAGTACGAGTATTCGAACGAGCAGAAGTACCAAAAACAGGAG |
| reading | | ACTCACTAGCAATGGCACGACGACTAGCACGATCAGTACGACGACTAACACGACGACGAGCACACCGACTACTACGAGCACGA |
| frame for | | CGACTACTAAAACGAGAAGGAGTACTACAAGCAGCAGACTTCGACGAAAACGGACTAATCAAATCACTACCAAACACACCATG |
| Nme2Cas9 | | ACAACTACGAGCAGCAGCACTAGACCGAAAACTAACACCACTAGAATGATCAGCAGTACTACTACACCTAATCAAACACCGAG |
| HNH | | GATACCTATCACAACGAAAAAACGAAGGAGAAACAGCAGACAAAGAACTAGGAGCACTACTAAAAGGAGTAGCAAACAACGCA |
| nickase | | CACGCACTACAAACAGGAGACTTCCGAACACCAGCAGAACTAGCACTAAACAAATTCGAAAAAGAATCAGGACACATCCGAAA |
| | | CCAACGAGGAGACTACTCACACACATTCTCACGAAAAGACCTACAAGCAGAACTAATCCTACTATTCGAAAAACAAAAAGAAT |
| | | TCGGAAACCCACACGTATCAGGAGGACTAAAAGAAGGAATCGAAACACTACTAATGACACAACGACCAGCACTATCAGGAGAC |
| | | GCAGTACAAAAAATGCTAGGACACTGCACATTCGAACCAGCAGAACCAAAAGCAGCAAAAAACACATACACAGCAGAACGATT |
| | | CATCTGACTAACAAAACTAAACAACCTACGAATCCTAGAACAAGGATCAGAACGACCACTAACAGACACAGAACGAGCAACAC |
| | | TAATGGACGAACCATACCGAAAATCAAAACTAACATACGCACAAGCACGAAAACTACTAGGACTAGAAGACACAGCATTCTTC |
| | | AAAGGACTACGATACGGAAAAGACAACGCAGAAGCATCAACACTAATGGAAATGAAAGCATACCACGCAATCTCACGAGCACT |
| | | AGAAAAAGAAGGACTAAAAGACAAAAAATCACCACTAAACCTATCATCAGAACTACAAGACGAAATCGGAACAGCATTCTCAC |
| | | TATTCAAAACAGACGAAGACATCACAGGACGACTAAAAGACCGAGTACAACCAGAAATCCTAGAAGCACTACTAAAACACATC |
| | | TCATTCGACAAATTCGTACAAATCTCACTAAAAGCACTACGACGAATCGTACCACTAATGGAACAAGGAAAACGATACGACGA |
| | | AGCATGCGCAGAAATCTACGGAGACCACTACGGAAAAAAAAACACAGAAGAAAAAATCTACCTACCACCAATCCCAGCAGACG |
| | | AAATCCGAAACCCAGTAGTACTACGAGCACTATCACAAGCACGAAAAGTAATCAACGGAGTAGTACGACGATACGGATCACCA |
| | | GCACGAATCCACATCGAAACAGCACGAGAAGTAGGAAAATCATTCAAAGACCGAAAAGAAATCGAAAAACGACAAGAAGAAAA |
| | | CCGAAAAGACCGAGAAAAAGCAGCAGCAAAATTCCGAGAATACTTCCCAAACTTCGTAGGAGAACCAAAATCAAAAGACATCC |
| | | TAAAACTACGACTATACGAACAACAACACGGAAAATGCCTATACTCAGGAAAAGAAATCAACCTAGTACGACTAAACGAAAAA |
| | | GGATACGTAGAAATCGACGCAGCACTACCATTCTCACGAACATGAGACGACTCATTCAACAACAAAGTACTAGTACTAGGATC |
| | | AGAAAACCAAAACAAAGGAAACCAAACACCATACGAATACTTCAACGGAAAAGACAACTCACGAGAATGACAAGAATTCAAAG |
| | | CACGAGTAGAAACATCACGATTCCCACGATCAAAAAAACAACGAATCCTACTACAAAAATTCGACGAAGACGGATTCAAAGAA |
| | | TGCAACCTAAACGACACACGATACGTAAACCGATTCCTATGCCAATTCGTAGCAGACCACATCCTACTAACAGGAAAAGGAAA |
| | | ACGACGAGTATTCGCATCAAACGGACAAATCACAAACCTACTACGAGGATTCTGAGGACTACGAAAAGTACGAGCAGAAAACG |
| | | ACCGACACCACGCACTAGACGCAGTAGTAGTAGCATGCTCAACAGTAGCAATGCAACAAAAAATCACACGATTCGTACGATAC |
| | | AAAGAAATGAACGCATTCGACGGAAAAACAATCGACAAAGAAACAGGAAAAGTACTACACCAAAAAACACACTTCCCACAACC |
| | | ATGAGAATTCTTCGCACAAGAAGTAATGATCCGAGTATTCGGAAAACCAGACGGAAAACCAGAATTCGAAGAAGCAGACACAC |
| | | CAGAAAAACTACGAACACTACTAGCAGAAAAACTATCATCACGACCAGAAGCAGTACACGAATACGTAACACCACTATTCGTA |
| | | TCACGAGCACCAAACCGAAAAATGTCAGGAGCACACAAAGACACACTACGATCAGCAAAACGATTCGTAAAACACAACGAAAA |
| | | AATCTCAGTAAAACGAGTATGACTAACAGAAATCAAACTAGCAGACCTAGAAAACATGGTAAACTACAAAAACGGACGAGAAA |
| | | TCGAACTATACGAAGCACTAAAAGCACGACTAGAAGCATACGGAGGAAACGCAAAACAAGCATTCGACCCAAAAGACAACCCA |
| | | TTCTACAAAAAAGGAGGACAACTAGTAAAAGCAGTACGAGTAGAAAAAACACAAGAATCAGGAGTACTACTAAACAAAAAAAA |
| | | CGCATACACAATCGCAGACAACGGAGACATGGTACGAGTAGACGTATTCTGCAAAGTAGACAAAAAAGGAAAAAACCAATACT |
| | | TCATCGTACCAATCTACGCATGACAAGTAGCAGAAAACATCCTACCAGACATCGACTGCAAAGGATACCGAATCGACGACTCA |
| | | TACACATTCTGCTTCTCACTACACAAATACGACCTAATCGCATTCCAAAAAGACGAAAAATCAAAAGTAGAATTCGCATACTA |
| | | CATCAACTGCGACTCATCAAACGGACGATTCTACCTAGCATGACACGACAAAGGATCAAAAGAACAACAATTCCGAATCTCAA |
| | | CACAAAACCTAGTACTAATCCAAAAATACCAAGTAAACGAACTAGGAAAAGAAATCCGACCATGCCGACTAAAAAAACGACCA |
| | | CCAGTACGAUAA |
| Exemplary | 276 | MAAFKPNPINYILGLDIGIASVGWAMVEIDEEENPIRLIDLGVRVFERAEVPKTGDSLAMARRLARSVRRLTRRRAHRLLRAR |
| amino | | RLLKREGVLQAADEDENGLIKSLPNTPWQLRAAALDRKLTPLEWSAVLLHLIKHRGYLSQRKNEGETADKELGALLKGVADNA |
| acid | | HALQTGDFRTPAELALNKFEKECGHIRNQRGDYSHTFSRKDLQAELNLLFEKQKEFGNPHVSGGLKEGIETLLMTQRPALSGD |
| sequence | | AVQKMLGHCTFEPAEPKAAKNTYTAERFIWLTKLNNLRILEQGSERPLTDTERATLMDEPYRKSKLTYAQARKLLSLEDTAFF |
| of | | KGLRYGKDNAEASTLMEMKAYHTISRALEKEGLKDKKSPLNLSPELQDEIGTAFSLEKTDEDITGRLKDRIQPEILEALLKHI |
| Nme3Cas9 | | SFDKFVQISLKALRRIVPLMEQGKRYDEACAEIYGDHYGKKNTEEKIYLPPIPADEIRNPVVLRALSQARKVINGVVRRYGSP |
| cleavase | | ARIHIETAREVGKSFKDRKEIEKRQEENRKDREKAAAKFREYFPNFVGEPKSKDILKLRLYEQQHGKCLYSGKEINLGRLNEK |
| | | GYVEIDHALPFSRTWDDSFNNKVLVLGSENQNKGNQTPYEYENGKDNSREWQEFKARVETSRFPRSKKQRILLQKFDEDGEKE |
| | | RNLNDTRYVNRFLCQFVADRMRLTGKGKKRVFASNGQITNLLRGFWGLRKVRAENDRHHALDAVVVACSTVAMQQKITREVRY |
| | | KEMNAFDGKTIDKETGEVLHQKTHFPQPWEFFAQEVMIRVFGKPDGKPEFEEADTPEKLRTLLAEKLSSRPEAVHEYVTPLFV |
| | | SRAPNRKMSGQGHMETVKSAKRLDEGVSVLRVPLTQLKLKDLEKMVNREREPKLYEALKARLEAHKDDPAKAFAEPFYKYDKA |
| | | GNRTQQVKAVRVEQVQKTGVWVRNHNGIADNATMVRVDVFEKGDKYYLVPIYSWQVAKGILPDRAVVAYADEEDWTVIDESFR |
| | | FKFVLYSNDLIKVQLKKDSFLGYESGLDRATGAISLREHDLEKSKGKDGMHRIGVKTALSFQKYQIDEMGKEIRPCRLKKRPP |
| | | VR |
| Exemplary | 277 | GCTGCTTTTAAGCCTAATCCTATTAATTATATTCTTGGTCTTGATATTGGTATTGCTTCTGTTGGTTGGGCTATGGTTGAGAT |
| coding | | TGATGAGGAGGAGAATCCTATTCGTCTTATTGATCTTGGTGTTCGTGTTTTTGAGCGTGCTGAGGTTCCTAAGACTGGTGATT |
| sequence | | CTCTTGCTATGGCTCGTCGTCTTGCTCGTTCTGTTCGTCGTCTTACTCGTCGTCGTGCTCATCGTCTTCTTCGTGCTCGTCGT |
| encoding | | CTTCTTAAGCGTGAGGGTGTTCTTCAGGCTGCTGATTTTGATGAGAATGGTCTTATTAAGTCTCTTCCTAATACTCCTTGGCA |
| Nme3Cas9 | | GCTTCGTGCTGCTGCTCTTGATCGTAAGCTTACTCCTCTTGAGTGGTCTGCTGTTCTTCTTCATCTTATTAAGCATCGTGGTT |
| cleavase | | ATCTTTCTCAGCGTAAGAATGAGGGTGAGACTGCTGATAAGGAGCTTGGTGCTCTTCTTAAGGGTGTTGCTGATAATGCTCAT |
| | | GCTCTTCAGACTGGTGATTTTCGTACTCCTGCTGAGCTTGCTCTTAATAAGTTTGAGAAGGAGTGTGGTCATATTCGTAATCA |
| | | GCGTGGTGATTATTCTCATACTTTTTCTCGTAAGGATCTTCAGGCTGAGCTTAATCTTCTTTTTGAGAAGCAGAAGGAGTTTG |
| | | GTAATCCTCATGTTTCTGGTGGTCTTAAGGAGGGTATTGAGACTCTTCTTATGACTCAGCGTCCTGCTCTTTCTGGTGATGCT |
| | | GTTCAGAAGATGCTTGGTCATTGTACTTTTGAGCCTGCTGAGCCTAAGGCTGCTAAGAATACTTATACTGCTGAGCGTTTTAT |
| | | TTGGCTTACTAAGCTTAATAATCTTCGTATTCTTGAGCAGGGTTCTGAGCGTCCTCTTACTGATACTGAGCGTGCTACTCTTA |
| | | TGGATGAGCCTTATCGTAAGTCTAAGCTTACTTATGCTCAGGCTCGTAAGCTTCTTTCTCTTGAGGATACTGCTTTTTTTAAG |
| | | GGTCTTCGTTATGGTAAGGATAATGCTGAGGCTTCTACTCTTATGGAGATGAAGGCTTATCATACTATTTCTCGTGCTCTTGA |
| | | GAAGGAGGGTCTTAAGGATAAGAAGTCTCCTCTTAATCTTTCTCCTGAGCTTCAGGATGAGATTGGTACTGCTTTTTCTCTTT |
| | | TTAAGACTGATGAGGATATTACTGGTCGTCTTAAGGATCGTATTCAGCCTGAGATTCTTGAGGCTCTTCTTAAGCATATTTCT |
| | | TTTGATAAGTTTGTTCAGATTTCTCTTAAGGCTCTTCGTCGTATTGTTCCTCTTATGGAGCAGGGTAAGCGTTATGATGAGGC |
| | | TTGTGCTGAGATTTATGGTGATCATTATGGTAAGAAGAATACTGAGGAGAAGATTTATCTTCCTCCTATTCCTGCTGATGAGA |
| | | TTCGTAATCCTGTTGTTCTTCGTGCTCTTTCTCAGGCTCGTAAGGTTATTAATGGTGTTGTTCGTCGTTATGGTTCTCCTGCT |
| | | CGTATTCATATTGAGACTGCTCGTGAGGTTGGTAAGTCTTTTAAGGATCGTAAGGAGATTGAGAAGCGTCAGGAGGAGAATCG |
| | | TAAGGATCGTGAGAAGGCTGCTGCTAAGTTTCGTGAGTATTTTCCTAATTTTGTTGGTGAGCCTAAGTCTAAGGATATTCTTA |
| | | AGCTTCGTCTTTATGAGCAGCAGCATGGTAAGTGTCTTTATTCTGGTAAGGAGATTAATCTTGGTCGTCTTAATGAGAAGGGT |
| | | TATGTTGAGATTGATCATGCTCTTCCTTTTTCTCGTACTTGGGATGATTCTTTTAATAATAAGGTTCTTGTTCTTGGTTCTGA |
| | | GAATCAGAATAAGGGTAATCAGACTCCTTATGAGTATTTTAATGGTAAGGATAATTCTCGTGAGTGGCAGGAGTTTAAGGCTC |
| | | GTGTTGAGACTTCTCGTTTTCCTCGTTCTAAGAAGCAGCGTATTCTTCTTCAGAAGTTTGATGAGGATGGTTTTAAGGAGCGT |
| | | AATCTTAATGATACTCGTTATGTTAATCGTTTTCTTTGTCAGTTTGTTGCTGATCGTATGCGTCTTACTGGTAAGGGTAAGAA |
| | | GCGTGTTTTTGCTTCTAATGGTCAGATTACTAATCTTCTTCGTGGTTTTTGGGGTCTTCGTAAGGTTCGTGCTGAGAATGATC |
| | | GTCATCATGCTCTTGATGCTGTTGTTGTTGCTTGTTCTACTGTTGCTATGCAGCAGAAGATTACTCGTTTTGTTCGTTATAAG |
| | | GAGATGAATGCTTTTGATGGTAAGACTATTGATAAGGAGACTGGTGAGGTTCTTCATCAGAAGACTCATTTTCCTCAGCCTTG |
| | | GGAGTTTTTTGCTCAGGAGGTTATGATTCGTGTTTTTGGTAAGCCTGATGGTAAGCCTGAGTTTGAGGAGGCTGATACTCCTG |
| | | AGAAGCTTCGTACTCTTCTTGCTGAGAAGCTTTCTTCTCGTCCTGAGGCTGTTCATGAGTATGTTACTCCTCTTTTTGTTTCT |
| | | CGTGCTCCTAATCGTAAGATGTCTGGTCAGGGTCATATGGAGACTGTTAAGTCTGCTAAGCGTCTTGATGAGGGTGTTTCTGT |
| | | TCTTCGTGTTCCTCTTACTCAGCTTAAGCTTAAGGATCTTGAGAAGATGGTTAATCGTGAGCGTGAGCCTAAGCTTTATGAGG |
| | | CTCTTAAGGCTCGTCTTGAGGCTCATAAGGATGATCCTGCTAAGGCTTTTGCTGAGCCTTTTTATAAGTATGATAAGGCTGGT |
| | | AATCGTACTCAGCAGGTTAAGGCTGTTCGTGTTGAGCAGGTTCAGAAGACTGGTGTTTGGGTTCGTAATCATAATGGTATTGC |
| | | TGATAATGCTACTATGGTTCGTGTTGATGTTTTTGAGAAGGGTGATAAGTATTATCTTGTTCCTATTTATTCTTGGCAGGTTG |
| | | CTAAGGGTATTCTTCCTGATCGTGCTGTTGTTGCTTATGCTGATGAGGAGGATTGGACTGTTATTGATGAGTCTTTTCGTTTT |
| | | AAGTTTGTTCTTTATTCTAATGATCTTATTAAGGTTCAGCTTAAGAAGGATTCTTTTCTTGGTTATTTTTCTGGTCTTGATCG |
| | | TGCTACTGGTGCTATTTCTCTTCGTGAGCATGATCTTGAGAAGTCTAAGGGTAAGGATGGTATGCATCGTATTGGTGTTAAGA |
| | | CTGCTCTTTCTTTTCAGAAGTATCAGATTGATGAGATGGGTAAGGAGATTCGTCCTTGTCGTCTTAAGAAGCGTCCTCCTGTT |
| | | CGT |
| Exemplary | 278 | GCCGCCTTCAAGCCCAACCCCATCAACTACATCCTGGGCCTGGACATCGGCATCGCCTCCGTGGGCTGGGCCATGGTGGAGAT |
| coding | | CGACGAGGAGGAGAACCCCATCCGGCTGATCGACCTGGGCGTGCGGGTGTTCGAGCGGGCCGAGGTGCCCAAGACCGGCGACT |
| sequence | | CCCTGGCCATGGCCCGGCGGCTGGCCCGGTCCGTGCGGCGGCTGACCCGGCGGCGGGCCCACCGGCTGCTGCGGGCCCGGCGG |
| encoding | | CTGCTGAAGCGGGAGGGCGTGCTGCAGGCCGCCGACTTCGACGAGAACGGCCTGATCAAGTCCCTGCCCAACACCCCCTGGCA |
| Nme3Cas9 | | GCTGCGGGCCGCCGCCCTGGACCGGAAGCTGACCCCCCTGGAGTGGTCCGCCGTGCTGCTGCACCTGATCAAGCACCGGGGCT |
| cleavase | | ACCTGTCCCAGCGGAAGAACGAGGGCGAGACCGCCGACAAGGAGCTGGGCGCCCTGCTGAAGGGCGTGGCCGACAACGCCCAC |
| | | GCCCTGCAGACCGGCGACTTCCGGACCCCCGCCGAGCTGGCCCTGAACAAGTTCGAGAAGGAGTGCGGCCACATCCGGAACCA |
| | | GCGGGGCGACTACTCCCACACCTTCTCCCGGAAGGACCTGCAGGCCGAGCTGAACCTGCTGTTCGAGAAGCAGAAGGAGTTCG |
| | | GCAACCCCCACGTGTCCGGCGGCCTGAAGGAGGGCATCGAGACCCTGCTGATGACCCAGCGGCCCGCCCTGTCCGGCGACGCC |
| | | GTGCAGAAGATGCTGGGCCACTGCACCTTCGAGCCCGCCGAGCCCAAGGCCGCCAAGAACACCTACACCGCCGAGCGGTTCAT |
| | | CTGGCTGACCAAGCTGAACAACCTGCGGATCCTGGAGCAGGGCTCCGAGCGGCCCCTGACCGACACCGAGCGGGCCACCCTGA |
| | | TGGACGAGCCCTACCGGAAGTCCAAGCTGACCTACGCCCAGGCCCGGAAGCTGCTGTCCCTGGAGGACACCGCCTTCTTCAAG |
| | | GGCCTGCGGTACGGCAAGGACAACGCCGAGGCCTCCACCCTGATGGAGATGAAGGCCTACCACACCATCTCCCGGGCCCTGGA |
| | | GAAGGAGGGCCTGAAGGACAAGAAGTCCCCCCTGAACCTGTCCCCCGAGCTGCAGGACGAGATCGGCACCGCCTTCTCCCTGT |
| | | TCAAGACCGACGAGGACATCACCGGCCGGCTGAAGGACCGGATCCAGCCCGAGATCCTGGAGGCCCTGCTGAAGCACATCTCC |
| | | TTCGACAAGTTCGTGCAGATCTCCCTGAAGGCCCTGCGGCGGATCGTGCCCCTGATGGAGCAGGGCAAGCGGTACGACGAGGC |
| | | CTGCGCCGAGATCTACGGCGACCACTACGGCAAGAAGAACACCGAGGAGAAGATCTACCTGCCCCCCATCCCCGCCGACGAGA |
| | | TCCGGAACCCCGTGGTGCTGCGGGCCCTGTCCCAGGCCCGGAAGGTGATCAACGGCGTGGTGCGGCGGTACGGCTCCCCCGCC |
| | | CGGATCCACATCGAGACCGCCCGGGAGGTGGGCAAGTCCTTCAAGGACCGGAAGGAGATCGAGAAGCGGCAGGAGGAGAACCG |
| | | GAAGGACCGGGAGAAGGCCGCCGCCAAGTTCCGGGAGTACTTCCCCAACTTCGTGGGCGAGCCCAAGTCCAAGGACATCCTGA |
| | | AGCTGCGGCTGTACGAGCAGCAGCACGGCAAGTGCCTGTACTCCGGCAAGGAGATCAACCTGGGCCGGCTGAACGAGAAGGGC |
| | | TACGTGGAGATCGACCACGCCCTGCCCTTCTCCCGGACCTGGGACGACTCCTTCAACAACAAGGTGCTGGTGCTGGGCTCCGA |
| | | GAACCAGAACAAGGGCAACCAGACCCCCTACGAGTACTTCAACGGCAAGGACAACTCCCGGGAGTGGCAGGAGTTCAAGGCCC |
| | | GGGTGGAGACCTCCCGGTTCCCCCGGTCCAAGAAGCAGCGGATCCTGCTGCAGAAGTTCGACGAGGACGGCTTCAAGGAGCGG |
| | | AACCTGAACGACACCCGGTACGTGAACCGGTTCCTGTGCCAGTTCGTGGCCGACCGGATGCGGCTGACCGGCAAGGGCAAGAA |
| | | GCGGGTGTTCGCCTCCAACGGCCAGATCACCAACCTGCTGCGGGGCTTCTGGGGCCTGCGGAAGGTGCGGGCCGAGAACGACC |
| | | GGCACCACGCCCTGGACGCCGTGGTGGTGGCCTGCTCCACCGTGGCCATGCAGCAGAAGATCACCCGGTTCGTGCGGTACAAG |
| | | GAGATGAACGCCTTCGACGGCAAGACCATCGACAAGGAGACCGGCGAGGTGCTGCACCAGAAGACCCACTTCCCCCAGCCCTG |
| | | GGAGTTCTTCGCCCAGGAGGTGATGATCCGGGTGTTCGGCAAGCCCGACGGCAAGCCCGAGTTCGAGGAGGCCGACACCCCCG |
| | | AGAAGCTGCGGACCCTGCTGGCCGAGAAGCTGTCCTCCCGGCCCGAGGCCGTGCACGAGTACGTGACCCCCCTGTTCGTGTCC |
| | | CGGGCCCCCAACCGGAAGATGTCCGGCCAGGGCCACATGGAGACCGTGAAGTCCGCCAAGCGGCTGGACGAGGGCGTGTCCGT |
| | | GCTGCGGGTGCCCCTGACCCAGCTGAAGCTGAAGGACCTGGAGAAGATGGTGAACCGGGAGCGGGAGCCCAAGCTGTACGAGG |
| | | CCCTGAAGGCCCGGCTGGAGGCCCACAAGGACGACCCCGCCAAGGCCTTCGCCGAGCCCTTCTACAAGTACGACAAGGCCGGC |
| | | AACCGGACCCAGCAGGTGAAGGCCGTGCGGGTGGAGCAGGTGCAGAAGACCGGCGTGTGGGTGCGGAACCACAACGGCATCGC |
| | | CGACAACGCCACCATGGTGCGGGTGGACGTGTTCGAGAAGGGCGACAAGTACTACCTGGTGCCCATCTACTCCTGGCAGGTGG |
| | | CCAAGGGCATCCTGCCCGACCGGGCCGTGGTGGCCTACGCCGACGAGGAGGACTGGACCGTGATCGACGAGTCCTTCCGGTTC |
| | | AAGTTCGTGCTGTACTCCAACGACCTGATCAAGGTGCAGCTGAAGAAGGACTCCTTCCTGGGCTACTTCTCCGGCCTGGACCG |
| | | GGCCACCGGCGCCATCTCCCTGCGGGAGCACGACCTGGAGAAGTCCAAGGGCAAGGACGGCATGCACCGGATCGGCGTGAAGA |
| | | CCGCCCTGTCCTTCCAGAAGTACCAGATCGACGAGATGGGCAAGGAGATCCGGCCCTGCCGGCTGAAGAAGCGGCCCCCCGTG |
| | | CGG |
| Exemplary | 279 | GCAGCATTCAAACCAAACCCAATCAACTACATCCTAGGACTAGACATCGGAATCGCATCAGTAGGATGAGCAATGGTAGAAAT |
| coding | | CGACGAAGAAGAAAACCCAATCCGACTAATCGACCTAGGAGTACGAGTATTCGAACGAGCAGAAGTACCAAAAACAGGAGACT |
| sequence | | CACTAGCAATGGCACGACGACTAGCACGATCAGTACGACGACTAACACGACGACGAGCACACCGACTACTACGAGCACGACGA |
| encoding | | CTACTAAAACGAGAAGGAGTACTACAAGCAGCAGACTTCGACGAAAACGGACTAATCAAATCACTACCAAACACACCATGACA |
| Nme3Cas9 | | ACTACGAGCAGCAGCACTAGACCGAAAACTAACACCACTAGAATGATCAGCAGTACTACTACACCTAATCAAACACCGAGGAT |
| cleavase | | ACCTATCACAACGAAAAAACGAAGGAGAAACAGCAGACAAAGAACTAGGAGCACTACTAAAAGGAGTAGCAGACAACGCACAC |
| | | GCACTACAAACAGGAGACTTCCGAACACCAGCAGAACTAGCACTAAACAAATTCGAAAAAGAATGCGGACACATCCGAAACCA |
| | | ACGAGGAGACTACTCACACACATTCTCACGAAAAGACCTACAAGCAGAACTAAACCTACTATTCGAAAAACAAAAAGAATTCG |
| | | GAAACCCACACGTATCAGGAGGACTAAAAGAAGGAATCGAAACACTACTAATGACACAACGACCAGCACTATCAGGAGACGCA |
| | | GTACAAAAAATGCTAGGACACTGCACATTCGAACCAGCAGAACCAAAAGCAGCAAAAAACACATACACAGCAGAACGATTCAT |
| | | CTGACTAACAAAACTAAACAACCTACGAATCCTAGAACAAGGATCAGAACGACCACTAACAGACACAGAACGAGCAACACTAA |
| | | TGGACGAACCATACCGAAAATCAAAACTAACATACGCACAAGCACGAAAACTACTATCACTAGAAGACACAGCATTCTTCAAA |
| | | GGACTACGATACGGAAAAGACAACGCAGAAGCATCAACACTAATGGAAATGAAAGCATACCACACAATCTCACGAGCACTAGA |
| | | AAAAGAAGGACTAAAAGACAAAAAATCACCACTAAACCTATCACCAGAACTACAAGACGAAATCGGAACAGCATTCTCACTAT |
| | | TCAAAACAGACGAAGACATCACAGGACGACTAAAAGACCGAATCCAACCAGAAATCCTAGAAGCACTACTAAAACACATCTCA |
| | | TTCGACAAATTCGTACAAATCTCACTAAAAGCACTACGACGAATCGTACCACTAATGGAACAAGGAAAACGATACGACGAAGC |
| | | ATGCGCAGAAATCTACGGAGACCACTACGGAAAAAAAAACACAGAAGAAAAAATCTACCTACCACCAATCCCAGCAGACGAAA |
| | | TCCGAAACCCAGTAGTACTACGAGCACTATCACAAGCACGAAAAGTAATCAACGGAGTAGTACGACGATACGGATCACCAGCA |
| | | CGAATCCACATCGAAACAGCACGAGAAGTAGGAAAATCATTCAAAGACCGAAAAGAAATCGAAAAACGACAAGAAGAAAACCG |
| | | AAAAGACCGAGAAAAAGCAGCAGCAAAATTCCGAGAATACTTCCCAAACTTCGTAGGAGAACCAAAATCAAAAGACATCCTAA |
| | | AACTACGACTATACGAACAACAACACGGAAAATGCCTATACTCAGGAAAAGAAATCAACCTAGGACGACTAAACGAAAAAGGA |
| | | TACGTAGAAATCGACCACGCACTACCATTCTCACGAACATGAGACGACTCATTCAACAACAAAGTACTAGTACTAGGATCAGA |
| | | AAACCAAAACAAAGGAAACCAAACACCATACGAATACTTCAACGGAAAAGACAACTCACGAGAATGACAAGAATTCAAAGCAC |
| | | GAGTAGAAACATCACGATTCCCACGATCAAAAAAACAACGAATCCTACTACAAAAATTCGACGAAGACGGATTCAAAGAACGA |
| | | AACCTAAACGACACACGATACGTAAACCGATTCCTATGCCAATTCGTAGCAGACCGAATGCGACTAACAGGAAAAGGAAAAAA |
| | | ACGAGTATTCGCATCAAACGGACAAATCACAAACCTACTACGAGGATTCTGAGGACTACGAAAAGTACGAGCAGAAAACGACC |
| | | GACACCACGCACTAGACGCAGTAGTAGTAGCATGCTCAACAGTAGCAATGCAACAAAAAATCACACGATTCGTACGATACAAA |
| | | GAAATGAACGCATTCGACGGAAAAACAATCGACAAAGAAACAGGAGAAGTACTACACCAAAAAACACACTTCCCACAACCATG |
| | | AGAATTCTTCGCACAAGAAGTAATGATCCGAGTATTCGGAAAACCAGACGGAAAACCAGAATTCGAAGAAGCAGACACACCAG |
| | | AAAAACTACGAACACTACTAGCAGAAAAACTATCATCACGACCAGAAGCAGTACACGAATACGTAACACCACTATTCGTATCA |
| | | CGAGCACCAAACCGAAAAATGTCAGGACAAGGACACATGGAAACAGTAAAATCAGCAAAACGACTAGACGAAGGAGTATCAGT |
| | | ACTACGAGTACCACTAACACAACTAAAACTAAAAGACCTAGAAAAAATGGTAAACCGAGAACGAGAACCAAAACTATACGAAG |
| | | CACTAAAAGCACGACTAGAAGCACACAAAGACGACCCAGCAAAAGCATTCGCAGAACCATTCTACAAATACGACAAAGCAGGA |
| | | AACCGAACACAACAAGTAAAAGCAGTACGAGTAGAACAAGTACAAAAAACAGGAGTATGAGTACGAAACCACAACGGAATCGC |
| | | AGACAACGCAACAATGGTACGAGTAGACGTATTCGAAAAAGGAGACAAATACTACCTAGTACCAATCTACTCATGACAAGTAG |
| | | CAAAAGGAATCCTACCAGACCGAGCAGTAGTAGCATACGCAGACGAAGAAGACTGAACAGTAATCGACGAATCATTCCGATTC |
| | | AAATTCGTACTATACTCAAACGACCTAATCAAAGTACAACTAAAAAAAGACTCATTCCTAGGATACTTCTCAGGACTAGACCG |
| | | AGCAACAGGAGCAATCTCACTACGAGAACACGACCTAGAAAAATCAAAAGGAAAAGACGGAATGCACCGAATCGGAGTAAAAA |
| | | CAGCACTATCATTCCAAAAATACCAAATCGACGAAATGGGAAAAGAAATCCGACCATGCCGACTAAAAAAACGACCACCAGTA |
| | | CGA |
| Exemplary | 280 | ATGGCTGCTTTTAAGCCTAATCCTATTAATTATATTCTTGGTCTTGATATTGGTATTGCTTCTGTTGGTTGGGCTATGGTTGA |
| open | | GATTGATGAGGAGGAGAATCCTATTCGTCTTATTGATCTTGGTGTTCGTGTTTTTGAGCGTGCTGAGGTTCCTAAGACTGGTG |
| reading | | ATTCTCTTGCTATGGCTCGTCGTCTTGCTCGTTCTGTTCGTCGTCTTACTCGTCGTCGTGCTCATCGTCTTCTTCGTGCTCGT |
| frame for | | CGTCTTCTTAAGCGTGAGGGTGTTCTTCAGGCTGCTGATTTTGATGAGAATGGTCTTATTAAGTCTCTTCCTAATACTCCTTG |
| Nme3Cas9 | | GCAGCTTCGTGCTGCTGCTCTTGATCGTAAGCTTACTCCTCTTGAGTGGTCTGCTGTTCTTCTTCATCTTATTAAGCATCGTG |
| cleavase | | GTTATCTTTCTCAGCGTAAGAATGAGGGTGAGACTGCTGATAAGGAGCTTGGTGCTCTTCTTAAGGGTGTTGCTGATAATGCT |
| | | CATGCTCTTCAGACTGGTGATTTTCGTACTCCTGCTGAGCTTGCTCTTAATAAGTTTGAGAAGGAGTGTGGTCATATTCGTAA |
| | | TCAGCGTGGTGATTATTCTCATACTTTTTCTCGTAAGGATCTTCAGGCTGAGCTTAATCTTCTTTTTGAGAAGCAGAAGGAGT |
| | | TTGGTAATCCTCATGTTTCTGGTGGTCTTAAGGAGGGTATTGAGACTCTTCTTATGACTCAGCGTCCTGCTCTTTCTGGTGAT |
| | | GCTGTTCAGAAGATGCTTGGTCATTGTACTTTTGAGCCTGCTGAGCCTAAGGCTGCTAAGAATACTTATACTGCTGAGCGTTT |
| | | TATTTGGCTTACTAAGCTTAATAATCTTCGTATTCTTGAGCAGGGTTCTGAGCGTCCTCTTACTGATACTGAGCGTGCTACTC |
| | | TTATGGATGAGCCTTATCGTAAGTCTAAGCTTACTTATGCTCAGGCTCGTAAGCTTCTTTCTCTTGAGGATACTGCTTTTTTT |
| | | AAGGGTCTTCGTTATGGTAAGGATAATGCTGAGGCTTCTACTCTTATGGAGATGAAGGCTTATCATACTATTTCTCGTGCTCT |
| | | TGAGAAGGAGGGTCTTAAGGATAAGAAGTCTCCTCTTAATCTTTCTCCTGAGCTTCAGGATGAGATTGGTACTGCTTTTTCTC |
| | | TTTTTAAGACTGATGAGGATATTACTGGTCGTCTTAAGGATCGTATTCAGCCTGAGATTCTTGAGGCTCTTCTTAAGCATATT |
| | | TCTTTTGATAAGTTTGTTCAGATTTCTCTTAAGGCTCTTCGTCGTATTGTTCCTCTTATGGAGCAGGGTAAGCGTTATGATGA |
| | | GGCTTGTGCTGAGATTTATGGTGATCATTATGGTAAGAAGAATACTGAGGAGAAGATTTATCTTCCTCCTATTCCTGCTGATG |
| | | AGATTCGTAATCCTGTTGTTCTTCGTGCTCTTTCTCAGGCTCGTAAGGTTATTAATGGTGTTGTTCGTCGTTATGGTTCTCCT |
| | | GCTCGTATTCATATTGAGACTGCTCGTGAGGTTGGTAAGTCTTTTAAGGATCGTAAGGAGATTGAGAAGCGTCAGGAGGAGAA |
| | | TCGTAAGGATCGTGAGAAGGCTGCTGCTAAGTTTCGTGAGTATTTTCCTAATTTTGTTGGTGAGCCTAAGTCTAAGGATATTC |
| | | TTAAGCTTCGTCTTTATGAGCAGCAGCATGGTAAGTGTCTTTATTCTGGTAAGGAGATTAATCTTGGTCGTCTTAATGAGAAG |
| | | GGTTATGTTGAGATTGATCATGCTCTTCCTTTTTCTCGTACTTGGGATGATTCTTTTAATAATAAGGTTCTTGTTCTTGGTTC |
| | | TGAGAATCAGAATAAGGGTAATCAGACTCCTTATGAGTATTTTAATGGTAAGGATAATTCTCGTGAGTGGCAGGAGTTTAAGG |
| | | CTCGTGTTGAGACTTCTCGTTTTCCTCGTTCTAAGAAGCAGCGTATTCTTCTTCAGAAGTTTGATGAGGATGGTTTTAAGGAG |
| | | CGTAATCTTAATGATACTCGTTATGTTAATCGTTTTCTTTGTCAGTTTGTTGCTGATCGTATGCGTCTTACTGGTAAGGGTAA |
| | | GAAGCGTGTTTTTGCTTCTAATGGTCAGATTACTAATCTTCTTCGTGGTTTTTGGGGTCTTCGTAAGGTTCGTGCTGAGAATG |
| | | ATCGTCATCATGCTCTTGATGCTGTTGTTGTTGCTTGTTCTACTGTTGCTATGCAGCAGAAGATTACTCGTTTTGTTCGTTAT |
| | | AAGGAGATGAATGCTTTTGATGGTAAGACTATTGATAAGGAGACTGGTGAGGTTCTTCATCAGAAGACTCATTTTCCTCAGCC |
| | | TTGGGAGTTTTTTGCTCAGGAGGTTATGATTCGTGTTTTTGGTAAGCCTGATGGTAAGCCTGAGTTTGAGGAGGCTGATACTC |
| | | CTGAGAAGCTTCGTACTCTTCTTGCTGAGAAGCTTTCTTCTCGTCCTGAGGCTGTTCATGAGTATGTTACTCCTCTTTTTGTT |
| | | TCTCGTGCTCCTAATCGTAAGATGTCTGGTCAGGGTCATATGGAGACTGTTAAGTCTGCTAAGCGTCTTGATGAGGGTGTTTC |
| | | TGTTCTTCGTGTTCCTCTTACTCAGCTTAAGCTTAAGGATCTTGAGAAGATGGTTAATCGTGAGCGTGAGCCTAAGCTTTATG |
| | | AGGCTCTTAAGGCTCGTCTTGAGGCTCATAAGGATGATCCTGCTAAGGCTTTTGCTGAGCCTTTTTATAAGTATGATAAGGCT |
| | | GGTAATCGTACTCAGCAGGTTAAGGCTGTTCGTGTTGAGCAGGTTCAGAAGACTGGTGTTTGGGTTCGTAATCATAATGGTAT |
| | | TGCTGATAATGCTACTATGGTTCGTGTTGATGTTTTTGAGAAGGGTGATAAGTATTATCTTGTTCCTATTTATTCTTGGCAGG |
| | | TTGCTAAGGGTATTCTTCCTGATCGTGCTGTTGTTGCTTATGCTGATGAGGAGGATTGGACTGTTATTGATGAGTCTTTTCGT |
| | | TTTAAGTTTGTTCTTTATTCTAATGATCTTATTAAGGTTCAGCTTAAGAAGGATTCTTTTCTTGGTTATTTTTCTGGTCTTGA |
| | | TCGTGCTACTGGTGCTATTTCTCTTCGTGAGCATGATCTTGAGAAGTCTAAGGGTAAGGATGGTATGCATCGTATTGGTGTTA |
| | | AGACTGCTCTTTCTTTTCAGAAGTATCAGATTGATGAGATGGGTAAGGAGATTCGTCCTTGTCGTCTTAAGAAGCGTCCTCCT |
| | | GTTCGTUGA |
| Exemplary | 281 | ATGGCCGCCTTCAAGCCCAACCCCATCAACTACATCCTGGGCCTGGACATCGGCATCGCCTCCGTGGGCTGGGCCATGGTGGA |
| open | | GATCGACGAGGAGGAGAACCCCATCCGGCTGATCGACCTGGGCGTGCGGGTGTTCGAGCGGGCCGAGGTGCCCAAGACCGGCG |
| reading | | ACTCCCTGGCCATGGCCCGGCGGCTGGCCCGGTCCGTGCGGCGGCTGACCCGGCGGCGGGCCCACCGGCTGCTGCGGGCCCGG |
| frame for | | CGGCTGCTGAAGCGGGAGGGCGTGCTGCAGGCCGCCGACTTCGACGAGAACGGCCTGATCAAGTCCCTGCCCAACACCCCCTG |
| Nme3Cas9 | | GCAGCTGCGGGCCGCCGCCCTGGACCGGAAGCTGACCCCCCTGGAGTGGTCCGCCGTGCTGCTGCACCTGATCAAGCACCGGG |
| cleavase | | GCTACCTGTCCCAGCGGAAGAACGAGGGCGAGACCGCCGACAAGGAGCTGGGCGCCCTGCTGAAGGGCGTGGCCGACAACGCC |
| | | CACGCCCTGCAGACCGGCGACTTCCGGACCCCCGCCGAGCTGGCCCTGAACAAGTTCGAGAAGGAGTGCGGCCACATCCGGAA |
| | | CCAGCGGGGCGACTACTCCCACACCTTCTCCCGGAAGGACCTGCAGGCCGAGCTGAACCTGCTGTTCGAGAAGCAGAAGGAGT |
| | | TCGGCAACCCCCACGTGTCCGGCGGCCTGAAGGAGGGCATCGAGACCCTGCTGATGACCCAGCGGCCCGCCCTGTCCGGCGAC |
| | | GCCGTGCAGAAGATGCTGGGCCACTGCACCTTCGAGCCCGCCGAGCCCAAGGCCGCCAAGAACACCTACACCGCCGAGCGGTT |
| | | CATCTGGCTGACCAAGCTGAACAACCTGCGGATCCTGGAGCAGGGCTCCGAGCGGCCCCTGACCGACACCGAGCGGGCCACCC |
| | | TGATGGACGAGCCCTACCGGAAGTCCAAGCTGACCTACGCCCAGGCCCGGAAGCTGCTGTCCCTGGAGGACACCGCCTTCTTC |
| | | AAGGGCCTGCGGTACGGCAAGGACAACGCCGAGGCCTCCACCCTGATGGAGATGAAGGCCTACCACACCATCTCCCGGGCCCT |
| | | GGAGAAGGAGGGCCTGAAGGACAAGAAGTCCCCCCTGAACCTGTCCCCCGAGCTGCAGGACGAGATCGGCACCGCCTTCTCCC |
| | | TGTTCAAGACCGACGAGGACATCACCGGCCGGCTGAAGGACCGGATCCAGCCCGAGATCCTGGAGGCCCTGCTGAAGCACATC |
| | | TCCTTCGACAAGTTCGTGCAGATCTCCCTGAAGGCCCTGCGGCGGATCGTGCCCCTGATGGAGCAGGGCAAGCGGTACGACGA |
| | | GGCCTGCGCCGAGATCTACGGCGACCACTACGGCAAGAAGAACACCGAGGAGAAGATCTACCTGCCCCCCATCCCCGCCGACG |
| | | AGATCCGGAACCCCGTGGTGCTGCGGGCCCTGTCCCAGGCCCGGAAGGTGATCAACGGCGTGGTGCGGCGGTACGGCTCCCCC |
| | | GCCCGGATCCACATCGAGACCGCCCGGGAGGTGGGCAAGTCCTTCAAGGACCGGAAGGAGATCGAGAAGCGGCAGGAGGAGAA |
| | | CCGGAAGGACCGGGAGAAGGCCGCCGCCAAGTTCCGGGAGTACTTCCCCAACTTCGTGGGCGAGCCCAAGTCCAAGGACATCC |
| | | TGAAGCTGCGGCTGTACGAGCAGCAGCACGGCAAGTGCCTGTACTCCGGCAAGGAGATCAACCTGGGCCGGCTGAACGAGAAG |
| | | GGCTACGTGGAGATCGACCACGCCCTGCCCTTCTCCCGGACCTGGGACGACTCCTTCAACAACAAGGTGCTGGTGCTGGGCTC |
| | | CGAGAACCAGAACAAGGGCAACCAGACCCCCTACGAGTACTTCAACGGCAAGGACAACTCCCGGGAGTGGCAGGAGTTCAAGG |
| | | CCCGGGTGGAGACCTCCCGGTTCCCCCGGTCCAAGAAGCAGCGGATCCTGCTGCAGAAGTTCGACGAGGACGGCTTCAAGGAG |
| | | CGGAACCTGAACGACACCCGGTACGTGAACCGGTTCCTGTGCCAGTTCGTGGCCGACCGGATGCGGCTGACCGGCAAGGGCAA |
| | | GAAGCGGGTGTTCGCCTCCAACGGCCAGATCACCAACCTGCTGCGGGGCTTCTGGGGCCTGCGGAAGGTGCGGGCCGAGAACG |
| | | ACCGGCACCACGCCCTGGACGCCGTGGTGGTGGCCTGCTCCACCGTGGCCATGCAGCAGAAGATCACCCGGTTCGTGCGGTAC |
| | | AAGGAGATGAACGCCTTCGACGGCAAGACCATCGACAAGGAGACCGGCGAGGTGCTGCACCAGAAGACCCACTTCCCCCAGCC |
| | | CTGGGAGTTCTTCGCCCAGGAGGTGATGATCCGGGTGTTCGGCAAGCCCGACGGCAAGCCCGAGTTCGAGGAGGCCGACACCC |
| | | CCGAGAAGCTGCGGACCCTGCTGGCCGAGAAGCTGTCCTCCCGGCCCGAGGCCGTGCACGAGTACGTGACCCCCCTGTTCGTG |
| | | TCCCGGGCCCCCAACCGGAAGATGTCCGGCCAGGGCCACATGGAGACCGTGAAGTCCGCCAAGCGGCTGGACGAGGGCGTGTC |
| | | CGTGCTGCGGGTGCCCCTGACCCAGCTGAAGCTGAAGGACCTGGAGAAGATGGTGAACCGGGAGCGGGAGCCCAAGCTGTACG |
| | | AGGCCCTGAAGGCCCGGCTGGAGGCCCACAAGGACGACCCCGCCAAGGCCTTCGCCGAGCCCTTCTACAAGTACGACAAGGCC |
| | | GGCAACCGGACCCAGCAGGTGAAGGCCGTGCGGGTGGAGCAGGTGCAGAAGACCGGCGTGTGGGTGCGGAACCACAACGGCAT |
| | | CGCCGACAACGCCACCATGGTGCGGGTGGACGTGTTCGAGAAGGGCGACAAGTACTACCTGGTGCCCATCTACTCCTGGCAGG |
| | | TGGCCAAGGGCATCCTGCCCGACCGGGCCGTGGTGGCCTACGCCGACGAGGAGGACTGGACCGTGATCGACGAGTCCTTCCGG |
| | | TTCAAGTTCGTGCTGTACTCCAACGACCTGATCAAGGTGCAGCTGAAGAAGGACTCCTTCCTGGGCTACTTCTCCGGCCTGGA |
| | | CCGGGCCACCGGCGCCATCTCCCTGCGGGAGCACGACCTGGAGAAGTCCAAGGGCAAGGACGGCATGCACCGGATCGGCGTGA |
| | | AGACCGCCCTGTCCTTCCAGAAGTACCAGATCGACGAGATGGGCAAGGAGATCCGGCCCTGCCGGCTGAAGAAGCGGCCCCCC |
| | | GTGCGGUGA |
| Exemplary | 282 | ATGGCAGCATTCAAACCAAACCCAATCAACTACATCCTAGGACTAGACATCGGAATCGCATCAGTAGGATGAGCAATGGTAGA |
| open | | AATCGACGAAGAAGAAAACCCAATCCGACTAATCGACCTAGGAGTACGAGTATTCGAACGAGCAGAAGTACCAAAAACAGGAG |
| reading | | ACTCACTAGCAATGGCACGACGACTAGCACGATCAGTACGACGACTAACACGACGACGAGCACACCGACTACTACGAGCACGA |
| frame for | | CGACTACTAAAACGAGAAGGAGTACTACAAGCAGCAGACTTCGACGAAAACGGACTAATCAAATCACTACCAAACACACCATG |
| Nme3Cas9 | | ACAACTACGAGCAGCAGCACTAGACCGAAAACTAACACCACTAGAATGATCAGCAGTACTACTACACCTAATCAAACACCGAG |
| cleavase | | GATACCTATCACAACGAAAAAACGAAGGAGAAACAGCAGACAAAGAACTAGGAGCACTACTAAAAGGAGTAGCAGACAACGCA |
| | | CACGCACTACAAACAGGAGACTTCCGAACACCAGCAGAACTAGCACTAAACAAATTCGAAAAAGAATGCGGACACATCCGAAA |
| | | CCAACGAGGAGACTACTCACACACATTCTCACGAAAAGACCTACAAGCAGAACTAAACCTACTATTCGAAAAACAAAAAGAAT |
| | | TCGGAAACCCACACGTATCAGGAGGACTAAAAGAAGGAATCGAAACACTACTAATGACACAACGACCAGCACTATCAGGAGAC |
| | | GCAGTACAAAAAATGCTAGGACACTGCACATTCGAACCAGCAGAACCAAAAGCAGCAAAAAACACATACACAGCAGAACGATT |
| | | CATCTGACTAACAAAACTAAACAACCTACGAATCCTAGAACAAGGATCAGAACGACCACTAACAGACACAGAACGAGCAACAC |
| | | TAATGGACGAACCATACCGAAAATCAAAACTAACATACGCACAAGCACGAAAACTACTATCACTAGAAGACACAGCATTCTTC |
| | | AAAGGACTACGATACGGAAAAGACAACGCAGAAGCATCAACACTAATGGAAATGAAAGCATACCACACAATCTCACGAGCACT |
| | | AGAAAAAGAAGGACTAAAAGACAAAAAATCACCACTAAACCTATCACCAGAACTACAAGACGAAATCGGAACAGCATTCTCAC |
| | | TATTCAAAACAGACGAAGACATCACAGGACGACTAAAAGACCGAATCCAACCAGAAATCCTAGAAGCACTACTAAAACACATC |
| | | TCATTCGACAAATTCGTACAAATCTCACTAAAAGCACTACGACGAATCGTACCACTAATGGAACAAGGAAAACGATACGACGA |
| | | AGCATGCGCAGAAATCTACGGAGACCACTACGGAAAAAAAAACACAGAAGAAAAAATCTACCTACCACCAATCCCAGCAGACG |
| | | AAATCCGAAACCCAGTAGTACTACGAGCACTATCACAAGCACGAAAAGTAATCAACGGAGTAGTACGACGATACGGATCACCA |
| | | GCACGAATCCACATCGAAACAGCACGAGAAGTAGGAAAATCATTCAAAGACCGAAAAGAAATCGAAAAACGACAAGAAGAAAA |
| | | CCGAAAAGACCGAGAAAAAGCAGCAGCAAAATTCCGAGAATACTTCCCAAACTTCGTAGGAGAACCAAAATCAAAAGACATCC |
| | | TAAAACTACGACTATACGAACAACAACACGGAAAATGCCTATACTCAGGAAAAGAAATCAACCTAGGACGACTAAACGAAAAA |
| | | GGATACGTAGAAATCGACCACGCACTACCATTCTCACGAACATGAGACGACTCATTCAACAACAAAGTACTAGTACTAGGATC |
| | | AGAAAACCAAAACAAAGGAAACCAAACACCATACGAATACTTCAACGGAAAAGACAACTCACGAGAATGACAAGAATTCAAAG |
| | | CACGAGTAGAAACATCACGATTCCCACGATCAAAAAAACAACGAATCCTACTACAAAAATTCGACGAAGACGGATTCAAAGAA |
| | | CGAAACCTAAACGACACACGATACGTAAACCGATTCCTATGCCAATTCGTAGCAGACCGAATGCGACTAACAGGAAAAGGAAA |
| | | AAAACGAGTATTCGCATCAAACGGACAAATCACAAACCTACTACGAGGATTCTGAGGACTACGAAAAGTACGAGCAGAAAACG |
| | | ACCGACACCACGCACTAGACGCAGTAGTAGTAGCATGCTCAACAGTAGCAATGCAACAAAAAATCACACGATTCGTACGATAC |
| | | AAAGAAATGAACGCATTCGACGGAAAAACAATCGACAAAGAAACAGGAGAAGTACTACACCAAAAAACACACTTCCCACAACC |
| | | ATGAGAATTCTTCGCACAAGAAGTAATGATCCGAGTATTCGGAAAACCAGACGGAAAACCAGAATTCGAAGAAGCAGACACAC |
| | | CAGAAAAACTACGAACACTACTAGCAGAAAAACTATCATCACGACCAGAAGCAGTACACGAATACGTAACACCACTATTCGTA |
| | | TCACGAGCACCAAACCGAAAAATGTCAGGACAAGGACACATGGAAACAGTAAAATCAGCAAAACGACTAGACGAAGGAGTATC |
| | | AGTACTACGAGTACCACTAACACAACTAAAACTAAAAGACCTAGAAAAAATGGTAAACCGAGAACGAGAACCAAAACTATACG |
| | | AAGCACTAAAAGCACGACTAGAAGCACACAAAGACGACCCAGCAAAAGCATTCGCAGAACCATTCTACAAATACGACAAAGCA |
| | | GGAAACCGAACACAACAAGTAAAAGCAGTACGAGTAGAACAAGTACAAAAAACAGGAGTATGAGTACGAAACCACAACGGAAT |
| | | CGCAGACAACGCAACAATGGTACGAGTAGACGTATTCGAAAAAGGAGACAAATACTACCTAGTACCAATCTACTCATGACAAG |
| | | TAGCAAAAGGAATCCTACCAGACCGAGCAGTAGTAGCATACGCAGACGAAGAAGACTGAACAGTAATCGACGAATCATTCCGA |
| | | TTCAAATTCGTACTATACTCAAACGACCTAATCAAAGTACAACTAAAAAAAGACTCATTCCTAGGATACTTCTCAGGACTAGA |
| | | CCGAGCAACAGGAGCAATCTCACTACGAGAACACGACCTAGAAAAATCAAAAGGAAAAGACGGAATGCACCGAATCGGAGTAA |
| | | AAACAGCACTATCATTCCAAAAATACCAAATCGACGAAATGGGAAAAGAAATCCGACCATGCCGACTAAAAAAACGACCACCA |
| | | GTACGAUAA |
| Exemplary | 283 | MAAFKPNPINYILGLAIGIASVGWAMVEIDEEENPIRLIDLGVRVFERAEVPKTGDSLAMARRLARSVRRLTRRRAHRLLRAR |
| amino | | RLLKREGVLQAADFDENGLIKSLPNTPWQLRAAALDRKLTPLEWSAVLLHLIKHRGYLSQRKNEGETADKELGALLKGVADNA |
| acid | | HALQTGDFRTPAELALNKFEKECGHIRNQRGDYSHTFSRKDLQAELNLLFEKQKEFGNPHVSGGLKEGIETLLMTQRPALSGD |
| sequence | | AVQKMLGHCTFEPAEPKAAKNTYTAERFIWLTKLNNLRILEQGSERPLTDTERATLMDEPYRKSKLTYAQARKLLSLEDTAFF |
| of | | KGLRYGKDNAEASTLMEMKAYHTISRALEKEGLKDKKSPLNLSPELQDEIGTAFSLEKTDEDITGRLKDRIQPEILEALLKHI |
| Nme3Cas9 | | SFDKFVQISLKALRRIVPLMEQGKRYDEACAEIYGDHYGKKNTEEKIYLPPIPADEIRNPVVLRALSQARKVINGVVRRYGSP |
| dCas9 | | ARIHIETAREVGKSFKDRKEIEKRQEENRKDREKAAAKFREYFPNFVGEPKSKDILKLRLYEQQHGKCLYSGKEINLGRLNEK |
| | | GYVEIDAALPESRTWDDSFNNKVLVLGSENQNKGNQTPYEYENGKDNSREWQEFKARVETSREPRSKKQRILLQKFDEDGEKE |
| | | RNLNDTRYVNRFLCQFVADRMRLTGKGKKRVFASNGQITNLLRGFWGLRKVRAENDRHHALDAVVVACSTVAMQQKITRFVRY |
| | | KEMNAFDGKTIDKETGEVLHQKTHEPQPWEFFAQEVMIRVFGKPDGKPEFEEADTPEKLRTLLAEKLSSRPEAVHEYVTPLFV |
| | | SRAPNRKMSGQGHMETVKSAKRLDEGVSVLRVPLTQLKLKDLEKMVNREREPKLYEALKARLEAHKDDPAKAFAEPFYKYDKA |
| | | GNRTQQVKAVRVEQVQKTGVWVRNHNGIADNATMVRVDVFEKGDKYYLVPIYSWQVAKGILPDRAVVAYADEEDWTVIDESFR |
| | | FKFVLYSNDLIKVQLKKDSFLGYFSGLDRATGAISLREHDLEKSKGKDGMHRIGVKTALSFQKYQIDEMGKEIRPCRLKKRPP |
| | | VR |
| Exemplary | 284 | GCTGCTTTTAAGCCTAATCCTATTAATTATATTCTTGGTCTTGCTATTGGTATTGCTTCTGTTGGTTGGGCTATGGTTGAGAT |
| coding | | TGATGAGGAGGAGAATCCTATTCGTCTTATTGATCTTGGTGTTCGTGTTTTTGAGCGTGCTGAGGTTCCTAAGACTGGTGATT |
| sequence | | CTCTTGCTATGGCTCGTCGTCTTGCTCGTTCTGTTCGTCGTCTTACTCGTCGTCGTGCTCATCGTCTTCTTCGTGCTCGTCGT |
| encoding | | CTTCTTAAGCGTGAGGGTGTTCTTCAGGCTGCTGATTTTGATGAGAATGGTCTTATTAAGTCTCTTCCTAATACTCCTTGGCA |
| Nme3Cas9 | | GCTTCGTGCTGCTGCTCTTGATCGTAAGCTTACTCCTCTTGAGTGGTCTGCTGTTCTTCTTCATCTTATTAAGCATCGTGGTT |
| dCas9 | | ATCTTTCTCAGCGTAAGAATGAGGGTGAGACTGCTGATAAGGAGCTTGGTGCTCTTCTTAAGGGTGTTGCTGATAATGCTCAT |
| | | GCTCTTCAGACTGGTGATTTTCGTACTCCTGCTGAGCTTGCTCTTAATAAGTTTGAGAAGGAGTGTGGTCATATTCGTAATCA |
| | | GCGTGGTGATTATTCTCATACTTTTTCTCGTAAGGATCTTCAGGCTGAGCTTAATCTTCTTTTTGAGAAGCAGAAGGAGTTTG |
| | | GTAATCCTCATGTTTCTGGTGGTCTTAAGGAGGGTATTGAGACTCTTCTTATGACTCAGCGTCCTGCTCTTTCTGGTGATGCT |
| | | GTTCAGAAGATGCTTGGTCATTGTACTTTTGAGCCTGCTGAGCCTAAGGCTGCTAAGAATACTTATACTGCTGAGCGTTTTAT |
| | | TTGGCTTACTAAGCTTAATAATCTTCGTATTCTTGAGCAGGGTTCTGAGCGTCCTCTTACTGATACTGAGCGTGCTACTCTTA |
| | | TGGATGAGCCTTATCGTAAGTCTAAGCTTACTTATGCTCAGGCTCGTAAGCTTCTTTCTCTTGAGGATACTGCTTTTTTTAAG |
| | | GGTCTTCGTTATGGTAAGGATAATGCTGAGGCTTCTACTCTTATGGAGATGAAGGCTTATCATACTATTTCTCGTGCTCTTGA |
| | | GAAGGAGGGTCTTAAGGATAAGAAGTCTCCTCTTAATCTTTCTCCTGAGCTTCAGGATGAGATTGGTACTGCTTTTTCTCTTT |
| | | TTAAGACTGATGAGGATATTACTGGTCGTCTTAAGGATCGTATTCAGCCTGAGATTCTTGAGGCTCTTCTTAAGCATATTTCT |
| | | TTTGATAAGTTTGTTCAGATTTCTCTTAAGGCTCTTCGTCGTATTGTTCCTCTTATGGAGCAGGGTAAGCGTTATGATGAGGC |
| | | TTGTGCTGAGATTTATGGTGATCATTATGGTAAGAAGAATACTGAGGAGAAGATTTATCTTCCTCCTATTCCTGCTGATGAGA |
| | | TTCGTAATCCTGTTGTTCTTCGTGCTCTTTCTCAGGCTCGTAAGGTTATTAATGGTGTTGTTCGTCGTTATGGTTCTCCTGCT |
| | | CGTATTCATATTGAGACTGCTCGTGAGGTTGGTAAGTCTTTTAAGGATCGTAAGGAGATTGAGAAGCGTCAGGAGGAGAATCG |
| | | TAAGGATCGTGAGAAGGCTGCTGCTAAGTTTCGTGAGTATTTTCCTAATTTTGTTGGTGAGCCTAAGTCTAAGGATATTCTTA |
| | | AGCTTCGTCTTTATGAGCAGCAGCATGGTAAGTGTCTTTATTCTGGTAAGGAGATTAATCTTGGTCGTCTTAATGAGAAGGGT |
| | | TATGTTGAGATTGATGCTGCTCTTCCTTTTTCTCGTACTTGGGATGATTCTTTTAATAATAAGGTTCTTGTTCTTGGTTCTGA |
| | | GAATCAGAATAAGGGTAATCAGACTCCTTATGAGTATTTTAATGGTAAGGATAATTCTCGTGAGTGGCAGGAGTTTAAGGCTC |
| | | GTGTTGAGACTTCTCGTTTTCCTCGTTCTAAGAAGCAGCGTATTCTTCTTCAGAAGTTTGATGAGGATGGTTTTAAGGAGCGT |
| | | AATCTTAATGATACTCGTTATGTTAATCGTTTTCTTTGTCAGTTTGTTGCTGATCGTATGCGTCTTACTGGTAAGGGTAAGAA |
| | | GCGTGTTTTTGCTTCTAATGGTCAGATTACTAATCTTCTTCGTGGTTTTTGGGGTCTTCGTAAGGTTCGTGCTGAGAATGATC |
| | | GTCATCATGCTCTTGATGCTGTTGTTGTTGCTTGTTCTACTGTTGCTATGCAGCAGAAGATTACTCGTTTTGTTCGTTATAAG |
| | | GAGATGAATGCTTTTGATGGTAAGACTATTGATAAGGAGACTGGTGAGGTTCTTCATCAGAAGACTCATTTTCCTCAGCCTTG |
| | | GGAGTTTTTTGCTCAGGAGGTTATGATTCGTGTTTTTGGTAAGCCTGATGGTAAGCCTGAGTTTGAGGAGGCTGATACTCCTG |
| | | AGAAGCTTCGTACTCTTCTTGCTGAGAAGCTTTCTTCTCGTCCTGAGGCTGTTCATGAGTATGTTACTCCTCTTTTTGTTTCT |
| | | CGTGCTCCTAATCGTAAGATGTCTGGTCAGGGTCATATGGAGACTGTTAAGTCTGCTAAGCGTCTTGATGAGGGTGTTTCTGT |
| | | TCTTCGTGTTCCTCTTACTCAGCTTAAGCTTAAGGATCTTGAGAAGATGGTTAATCGTGAGCGTGAGCCTAAGCTTTATGAGG |
| | | CTCTTAAGGCTCGTCTTGAGGCTCATAAGGATGATCCTGCTAAGGCTTTTGCTGAGCCTTTTTATAAGTATGATAAGGCTGGT |
| | | AATCGTACTCAGCAGGTTAAGGCTGTTCGTGTTGAGCAGGTTCAGAAGACTGGTGTTTGGGTTCGTAATCATAATGGTATTGC |
| | | TGATAATGCTACTATGGTTCGTGTTGATGTTTTTGAGAAGGGTGATAAGTATTATCTTGTTCCTATTTATTCTTGGCAGGTTG |
| | | CTAAGGGTATTCTTCCTGATCGTGCTGTTGTTGCTTATGCTGATGAGGAGGATTGGACTGTTATTGATGAGTCTTTTCGTTTT |
| | | AAGTTTGTTCTTTATTCTAATGATCTTATTAAGGTTCAGCTTAAGAAGGATTCTTTTCTTGGTTATTTTTCTGGTCTTGATCG |
| | | TGCTACTGGTGCTATTTCTCTTCGTGAGCATGATCTTGAGAAGTCTAAGGGTAAGGATGGTATGCATCGTATTGGTGTTAAGA |
| | | CTGCTCTTTCTTTTCAGAAGTATCAGATTGATGAGATGGGTAAGGAGATTCGTCCTTGTCGTCTTAAGAAGCGTCCTCCTGTT |
| | | CGT |
| Exemplary | 285 | GCCGCCTTCAAGCCCAACCCCATCAACTACATCCTGGGCCTGGCCATCGGCATCGCCTCCGTGGGCTGGGCCATGGTGGAGAT |
| coding | | CGACGAGGAGGAGAACCCCATCCGGCTGATCGACCTGGGCGTGCGGGTGTTCGAGCGGGCCGAGGTGCCCAAGACCGGCGACT |
| sequence | | CCCTGGCCATGGCCCGGCGGCTGGCCCGGTCCGTGCGGCGGCTGACCCGGCGGCGGGCCCACCGGCTGCTGCGGGCCCGGCGG |
| encoding | | CTGCTGAAGCGGGAGGGCGTGCTGCAGGCCGCCGACTTCGACGAGAACGGCCTGATCAAGTCCCTGCCCAACACCCCCTGGCA |
| Nme3Cas9 | | GCTGCGGGCCGCCGCCCTGGACCGGAAGCTGACCCCCCTGGAGTGGTCCGCCGTGCTGCTGCACCTGATCAAGCACCGGGGCT |
| dCas9 | | ACCTGTCCCAGCGGAAGAACGAGGGCGAGACCGCCGACAAGGAGCTGGGCGCCCTGCTGAAGGGCGTGGCCGACAACGCCCAC |
| | | GCCCTGCAGACCGGCGACTTCCGGACCCCCGCCGAGCTGGCCCTGAACAAGTTCGAGAAGGAGTGCGGCCACATCCGGAACCA |
| | | GCGGGGCGACTACTCCCACACCTTCTCCCGGAAGGACCTGCAGGCCGAGCTGAACCTGCTGTTCGAGAAGCAGAAGGAGTTCG |
| | | GCAACCCCCACGTGTCCGGCGGCCTGAAGGAGGGCATCGAGACCCTGCTGATGACCCAGCGGCCCGCCCTGTCCGGCGACGCC |
| | | GTGCAGAAGATGCTGGGCCACTGCACCTTCGAGCCCGCCGAGCCCAAGGCCGCCAAGAACACCTACACCGCCGAGCGGTTCAT |
| | | CTGGCTGACCAAGCTGAACAACCTGCGGATCCTGGAGCAGGGCTCCGAGCGGCCCCTGACCGACACCGAGCGGGCCACCCTGA |
| | | TGGACGAGCCCTACCGGAAGTCCAAGCTGACCTACGCCCAGGCCCGGAAGCTGCTGTCCCTGGAGGACACCGCCTTCTTCAAG |
| | | GGCCTGCGGTACGGCAAGGACAACGCCGAGGCCTCCACCCTGATGGAGATGAAGGCCTACCACACCATCTCCCGGGCCCTGGA |
| | | GAAGGAGGGCCTGAAGGACAAGAAGTCCCCCCTGAACCTGTCCCCCGAGCTGCAGGACGAGATCGGCACCGCCTTCTCCCTGT |
| | | TCAAGACCGACGAGGACATCACCGGCCGGCTGAAGGACCGGATCCAGCCCGAGATCCTGGAGGCCCTGCTGAAGCACATCTCC |
| | | TTCGACAAGTTCGTGCAGATCTCCCTGAAGGCCCTGCGGCGGATCGTGCCCCTGATGGAGCAGGGCAAGCGGTACGACGAGGC |
| | | CTGCGCCGAGATCTACGGCGACCACTACGGCAAGAAGAACACCGAGGAGAAGATCTACCTGCCCCCCATCCCCGCCGACGAGA |
| | | TCCGGAACCCCGTGGTGCTGCGGGCCCTGTCCCAGGCCCGGAAGGTGATCAACGGCGTGGTGCGGCGGTACGGCTCCCCCGCC |
| | | CGGATCCACATCGAGACCGCCCGGGAGGTGGGCAAGTCCTTCAAGGACCGGAAGGAGATCGAGAAGCGGCAGGAGGAGAACCG |
| | | GAAGGACCGGGAGAAGGCCGCCGCCAAGTTCCGGGAGTACTTCCCCAACTTCGTGGGCGAGCCCAAGTCCAAGGACATCCTGA |
| | | AGCTGCGGCTGTACGAGCAGCAGCACGGCAAGTGCCTGTACTCCGGCAAGGAGATCAACCTGGGCCGGCTGAACGAGAAGGGC |
| | | TACGTGGAGATCGACGCCGCCCTGCCCTTCTCCCGGACCTGGGACGACTCCTTCAACAACAAGGTGCTGGTGCTGGGCTCCGA |
| | | GAACCAGAACAAGGGCAACCAGACCCCCTACGAGTACTTCAACGGCAAGGACAACTCCCGGGAGTGGCAGGAGTTCAAGGCCC |
| | | GGGTGGAGACCTCCCGGTTCCCCCGGTCCAAGAAGCAGCGGATCCTGCTGCAGAAGTTCGACGAGGACGGCTTCAAGGAGCGG |
| | | AACCTGAACGACACCCGGTACGTGAACCGGTTCCTGTGCCAGTTCGTGGCCGACCGGATGCGGCTGACCGGCAAGGGCAAGAA |
| | | GCGGGTGTTCGCCTCCAACGGCCAGATCACCAACCTGCTGCGGGGCTTCTGGGGCCTGCGGAAGGTGCGGGCCGAGAACGACC |
| | | GGCACCACGCCCTGGACGCCGTGGTGGTGGCCTGCTCCACCGTGGCCATGCAGCAGAAGATCACCCGGTTCGTGCGGTACAAG |
| | | GAGATGAACGCCTTCGACGGCAAGACCATCGACAAGGAGACCGGCGAGGTGCTGCACCAGAAGACCCACTTCCCCCAGCCCTG |
| | | GGAGTTCTTCGCCCAGGAGGTGATGATCCGGGTGTTCGGCAAGCCCGACGGCAAGCCCGAGTTCGAGGAGGCCGACACCCCCG |
| | | AGAAGCTGCGGACCCTGCTGGCCGAGAAGCTGTCCTCCCGGCCCGAGGCCGTGCACGAGTACGTGACCCCCCTGTTCGTGTCC |
| | | CGGGCCCCCAACCGGAAGATGTCCGGCCAGGGCCACATGGAGACCGTGAAGTCCGCCAAGCGGCTGGACGAGGGCGTGTCCGT |
| | | GCTGCGGGTGCCCCTGACCCAGCTGAAGCTGAAGGACCTGGAGAAGATGGTGAACCGGGAGCGGGAGCCCAAGCTGTACGAGG |
| | | CCCTGAAGGCCCGGCTGGAGGCCCACAAGGACGACCCCGCCAAGGCCTTCGCCGAGCCCTTCTACAAGTACGACAAGGCCGGC |
| | | AACCGGACCCAGCAGGTGAAGGCCGTGCGGGTGGAGCAGGTGCAGAAGACCGGCGTGTGGGTGCGGAACCACAACGGCATCGC |
| | | CGACAACGCCACCATGGTGCGGGTGGACGTGTTCGAGAAGGGCGACAAGTACTACCTGGTGCCCATCTACTCCTGGCAGGTGG |
| | | CCAAGGGCATCCTGCCCGACCGGGCCGTGGTGGCCTACGCCGACGAGGAGGACTGGACCGTGATCGACGAGTCCTTCCGGTTC |
| | | AAGTTCGTGCTGTACTCCAACGACCTGATCAAGGTGCAGCTGAAGAAGGACTCCTTCCTGGGCTACTTCTCCGGCCTGGACCG |
| | | GGCCACCGGCGCCATCTCCCTGCGGGAGCACGACCTGGAGAAGTCCAAGGGCAAGGACGGCATGCACCGGATCGGCGTGAAGA |
| | | CCGCCCTGTCCTTCCAGAAGTACCAGATCGACGAGATGGGCAAGGAGATCCGGCCCTGCCGGCTGAAGAAGCGGCCCCCCGTG |
| | | CGG |
| Exemplary | 286 | GCAGCATTCAAACCAAACCCAATCAACTACATCCTAGGACTAGCAATCGGAATCGCATCAGTAGGATGAGCAATGGTAGAAAT |
| coding | | CGACGAAGAAGAAAACCCAATCCGACTAATCGACCTAGGAGTACGAGTATTCGAACGAGCAGAAGTACCAAAAACAGGAGACT |
| sequence | | CACTAGCAATGGCACGACGACTAGCACGATCAGTACGACGACTAACACGACGACGAGCACACCGACTACTACGAGCACGACGA |
| encoding | | CTACTAAAACGAGAAGGAGTACTACAAGCAGCAGACTTCGACGAAAACGGACTAATCAAATCACTACCAAACACACCATGACA |
| Nme3Cas9 | | ACTACGAGCAGCAGCACTAGACCGAAAACTAACACCACTAGAATGATCAGCAGTACTACTACACCTAATCAAACACCGAGGAT |
| dCas9 | | ACCTATCACAACGAAAAAACGAAGGAGAAACAGCAGACAAAGAACTAGGAGCACTACTAAAAGGAGTAGCAGACAACGCACAC |
| | | GCACTACAAACAGGAGACTTCCGAACACCAGCAGAACTAGCACTAAACAAATTCGAAAAAGAATGCGGACACATCCGAAACCA |
| | | ACGAGGAGACTACTCACACACATTCTCACGAAAAGACCTACAAGCAGAACTAAACCTACTATTCGAAAAACAAAAAGAATTCG |
| | | GAAACCCACACGTATCAGGAGGACTAAAAGAAGGAATCGAAACACTACTAATGACACAACGACCAGCACTATCAGGAGACGCA |
| | | GTACAAAAAATGCTAGGACACTGCACATTCGAACCAGCAGAACCAAAAGCAGCAAAAAACACATACACAGCAGAACGATTCAT |
| | | CTGACTAACAAAACTAAACAACCTACGAATCCTAGAACAAGGATCAGAACGACCACTAACAGACACAGAACGAGCAACACTAA |
| | | TGGACGAACCATACCGAAAATCAAAACTAACATACGCACAAGCACGAAAACTACTATCACTAGAAGACACAGCATTCTTCAAA |
| | | GGACTACGATACGGAAAAGACAACGCAGAAGCATCAACACTAATGGAAATGAAAGCATACCACACAATCTCACGAGCACTAGA |
| | | AAAAGAAGGACTAAAAGACAAAAAATCACCACTAAACCTATCACCAGAACTACAAGACGAAATCGGAACAGCATTCTCACTAT |
| | | TCAAAACAGACGAAGACATCACAGGACGACTAAAAGACCGAATCCAACCAGAAATCCTAGAAGCACTACTAAAACACATCTCA |
| | | TTCGACAAATTCGTACAAATCTCACTAAAAGCACTACGACGAATCGTACCACTAATGGAACAAGGAAAACGATACGACGAAGC |
| | | ATGCGCAGAAATCTACGGAGACCACTACGGAAAAAAAAACACAGAAGAAAAAATCTACCTACCACCAATCCCAGCAGACGAAA |
| | | TCCGAAACCCAGTAGTACTACGAGCACTATCACAAGCACGAAAAGTAATCAACGGAGTAGTACGACGATACGGATCACCAGCA |
| | | CGAATCCACATCGAAACAGCACGAGAAGTAGGAAAATCATTCAAAGACCGAAAAGAAATCGAAAAACGACAAGAAGAAAACCG |
| | | AAAAGACCGAGAAAAAGCAGCAGCAAAATTCCGAGAATACTTCCCAAACTTCGTAGGAGAACCAAAATCAAAAGACATCCTAA |
| | | AACTACGACTATACGAACAACAACACGGAAAATGCCTATACTCAGGAAAAGAAATCAACCTAGGACGACTAAACGAAAAAGGA |
| | | TACGTAGAAATCGACGCAGCACTACCATTCTCACGAACATGAGACGACTCATTCAACAACAAAGTACTAGTACTAGGATCAGA |
| | | AAACCAAAACAAAGGAAACCAAACACCATACGAATACTTCAACGGAAAAGACAACTCACGAGAATGACAAGAATTCAAAGCAC |
| | | GAGTAGAAACATCACGATTCCCACGATCAAAAAAACAACGAATCCTACTACAAAAATTCGACGAAGACGGATTCAAAGAACGA |
| | | AACCTAAACGACACACGATACGTAAACCGATTCCTATGCCAATTCGTAGCAGACCGAATGCGACTAACAGGAAAAGGAAAAAA |
| | | ACGAGTATTCGCATCAAACGGACAAATCACAAACCTACTACGAGGATTCTGAGGACTACGAAAAGTACGAGCAGAAAACGACC |
| | | GACACCACGCACTAGACGCAGTAGTAGTAGCATGCTCAACAGTAGCAATGCAACAAAAAATCACACGATTCGTACGATACAAA |
| | | GAAATGAACGCATTCGACGGAAAAACAATCGACAAAGAAACAGGAGAAGTACTACACCAAAAAACACACTTCCCACAACCATG |
| | | AGAATTCTTCGCACAAGAAGTAATGATCCGAGTATTCGGAAAACCAGACGGAAAACCAGAATTCGAAGAAGCAGACACACCAG |
| | | AAAAACTACGAACACTACTAGCAGAAAAACTATCATCACGACCAGAAGCAGTACACGAATACGTAACACCACTATTCGTATCA |
| | | CGAGCACCAAACCGAAAAATGTCAGGACAAGGACACATGGAAACAGTAAAATCAGCAAAACGACTAGACGAAGGAGTATCAGT |
| | | ACTACGAGTACCACTAACACAACTAAAACTAAAAGACCTAGAAAAAATGGTAAACCGAGAACGAGAACCAAAACTATACGAAG |
| | | CACTAAAAGCACGACTAGAAGCACACAAAGACGACCCAGCAAAAGCATTCGCAGAACCATTCTACAAATACGACAAAGCAGGA |
| | | AACCGAACACAACAAGTAAAAGCAGTACGAGTAGAACAAGTACAAAAAACAGGAGTATGAGTACGAAACCACAACGGAATCGC |
| | | AGACAACGCAACAATGGTACGAGTAGACGTATTCGAAAAAGGAGACAAATACTACCTAGTACCAATCTACTCATGACAAGTAG |
| | | CAAAAGGAATCCTACCAGACCGAGCAGTAGTAGCATACGCAGACGAAGAAGACTGAACAGTAATCGACGAATCATTCCGATTC |
| | | AAATTCGTACTATACTCAAACGACCTAATCAAAGTACAACTAAAAAAAGACTCATTCCTAGGATACTTCTCAGGACTAGACCG |
| | | AGCAACAGGAGCAATCTCACTACGAGAACACGACCTAGAAAAATCAAAAGGAAAAGACGGAATGCACCGAATCGGAGTAAAAA |
| | | CAGCACTATCATTCCAAAAATACCAAATCGACGAAATGGGAAAAGAAATCCGACCATGCCGACTAAAAAAACGACCACCAGTA |
| | | CGA |
| Exemplary | 287 | ATGGCTGCTTTTAAGCCTAATCCTATTAATTATATTCTTGGTCTTGCTATTGGTATTGCTTCTGTTGGTTGGGCTATGGTTGA |
| open | | GATTGATGAGGAGGAGAATCCTATTCGTCTTATTGATCTTGGTGTTCGTGTTTTTGAGCGTGCTGAGGTTCCTAAGACTGGTG |
| reading | | ATTCTCTTGCTATGGCTCGTCGTCTTGCTCGTTCTGTTCGTCGTCTTACTCGTCGTCGTGCTCATCGTCTTCTTCGTGCTCGT |
| frame for | | CGTCTTCTTAAGCGTGAGGGTGTTCTTCAGGCTGCTGATTTTGATGAGAATGGTCTTATTAAGTCTCTTCCTAATACTCCTTG |
| Nme3Cas9 | | GCAGCTTCGTGCTGCTGCTCTTGATCGTAAGCTTACTCCTCTTGAGTGGTCTGCTGTTCTTCTTCATCTTATTAAGCATCGTG |
| dCas9 | | GTTATCTTTCTCAGCGTAAGAATGAGGGTGAGACTGCTGATAAGGAGCTTGGTGCTCTTCTTAAGGGTGTTGCTGATAATGCT |
| | | CATGCTCTTCAGACTGGTGATTTTCGTACTCCTGCTGAGCTTGCTCTTAATAAGTTTGAGAAGGAGTGTGGTCATATTCGTAA |
| | | TCAGCGTGGTGATTATTCTCATACTTTTTCTCGTAAGGATCTTCAGGCTGAGCTTAATCTTCTTTTTGAGAAGCAGAAGGAGT |
| | | TTGGTAATCCTCATGTTTCTGGTGGTCTTAAGGAGGGTATTGAGACTCTTCTTATGACTCAGCGTCCTGCTCTTTCTGGTGAT |
| | | GCTGTTCAGAAGATGCTTGGTCATTGTACTTTTGAGCCTGCTGAGCCTAAGGCTGCTAAGAATACTTATACTGCTGAGCGTTT |
| | | TATTTGGCTTACTAAGCTTAATAATCTTCGTATTCTTGAGCAGGGTTCTGAGCGTCCTCTTACTGATACTGAGCGTGCTACTC |
| | | TTATGGATGAGCCTTATCGTAAGTCTAAGCTTACTTATGCTCAGGCTCGTAAGCTTCTTTCTCTTGAGGATACTGCTTTTTTT |
| | | AAGGGTCTTCGTTATGGTAAGGATAATGCTGAGGCTTCTACTCTTATGGAGATGAAGGCTTATCATACTATTTCTCGTGCTCT |
| | | TGAGAAGGAGGGTCTTAAGGATAAGAAGTCTCCTCTTAATCTTTCTCCTGAGCTTCAGGATGAGATTGGTACTGCTTTTTCTC |
| | | TTTTTAAGACTGATGAGGATATTACTGGTCGTCTTAAGGATCGTATTCAGCCTGAGATTCTTGAGGCTCTTCTTAAGCATATT |
| | | TCTTTTGATAAGTTTGTTCAGATTTCTCTTAAGGCTCTTCGTCGTATTGTTCCTCTTATGGAGCAGGGTAAGCGTTATGATGA |
| | | GGCTTGTGCTGAGATTTATGGTGATCATTATGGTAAGAAGAATACTGAGGAGAAGATTTATCTTCCTCCTATTCCTGCTGATG |
| | | AGATTCGTAATCCTGTTGTTCTTCGTGCTCTTTCTCAGGCTCGTAAGGTTATTAATGGTGTTGTTCGTCGTTATGGTTCTCCT |
| | | GCTCGTATTCATATTGAGACTGCTCGTGAGGTTGGTAAGTCTTTTAAGGATCGTAAGGAGATTGAGAAGCGTCAGGAGGAGAA |
| | | TCGTAAGGATCGTGAGAAGGCTGCTGCTAAGTTTCGTGAGTATTTTCCTAATTTTGTTGGTGAGCCTAAGTCTAAGGATATTC |
| | | TTAAGCTTCGTCTTTATGAGCAGCAGCATGGTAAGTGTCTTTATTCTGGTAAGGAGATTAATCTTGGTCGTCTTAATGAGAAG |
| | | GGTTATGTTGAGATTGATGCTGCTCTTCCTTTTTCTCGTACTTGGGATGATTCTTTTAATAATAAGGTTCTTGTTCTTGGTTC |
| | | TGAGAATCAGAATAAGGGTAATCAGACTCCTTATGAGTATTTTAATGGTAAGGATAATTCTCGTGAGTGGCAGGAGTTTAAGG |
| | | CTCGTGTTGAGACTTCTCGTTTTCCTCGTTCTAAGAAGCAGCGTATTCTTCTTCAGAAGTTTGATGAGGATGGTTTTAAGGAG |
| | | CGTAATCTTAATGATACTCGTTATGTTAATCGTTTTCTTTGTCAGTTTGTTGCTGATCGTATGCGTCTTACTGGTAAGGGTAA |
| | | GAAGCGTGTTTTTGCTTCTAATGGTCAGATTACTAATCTTCTTCGTGGTTTTTGGGGTCTTCGTAAGGTTCGTGCTGAGAATG |
| | | ATCGTCATCATGCTCTTGATGCTGTTGTTGTTGCTTGTTCTACTGTTGCTATGCAGCAGAAGATTACTCGTTTTGTTCGTTAT |
| | | AAGGAGATGAATGCTTTTGATGGTAAGACTATTGATAAGGAGACTGGTGAGGTTCTTCATCAGAAGACTCATTTTCCTCAGCC |
| | | TTGGGAGTTTTTTGCTCAGGAGGTTATGATTCGTGTTTTTGGTAAGCCTGATGGTAAGCCTGAGTTTGAGGAGGCTGATACTC |
| | | CTGAGAAGCTTCGTACTCTTCTTGCTGAGAAGCTTTCTTCTCGTCCTGAGGCTGTTCATGAGTATGTTACTCCTCTTTTTGTT |
| | | TCTCGTGCTCCTAATCGTAAGATGTCTGGTCAGGGTCATATGGAGACTGTTAAGTCTGCTAAGCGTCTTGATGAGGGTGTTTC |
| | | TGTTCTTCGTGTTCCTCTTACTCAGCTTAAGCTTAAGGATCTTGAGAAGATGGTTAATCGTGAGCGTGAGCCTAAGCTTTATG |
| | | AGGCTCTTAAGGCTCGTCTTGAGGCTCATAAGGATGATCCTGCTAAGGCTTTTGCTGAGCCTTTTTATAAGTATGATAAGGCT |
| | | GGTAATCGTACTCAGCAGGTTAAGGCTGTTCGTGTTGAGCAGGTTCAGAAGACTGGTGTTTGGGTTCGTAATCATAATGGTAT |
| | | TGCTGATAATGCTACTATGGTTCGTGTTGATGTTTTTGAGAAGGGTGATAAGTATTATCTTGTTCCTATTTATTCTTGGCAGG |
| | | TTGCTAAGGGTATTCTTCCTGATCGTGCTGTTGTTGCTTATGCTGATGAGGAGGATTGGACTGTTATTGATGAGTCTTTTCGT |
| | | TTTAAGTTTGTTCTTTATTCTAATGATCTTATTAAGGTTCAGCTTAAGAAGGATTCTTTTCTTGGTTATTTTTCTGGTCTTGA |
| | | TCGTGCTACTGGTGCTATTTCTCTTCGTGAGCATGATCTTGAGAAGTCTAAGGGTAAGGATGGTATGCATCGTATTGGTGTTA |
| | | AGACTGCTCTTTCTTTTCAGAAGTATCAGATTGATGAGATGGGTAAGGAGATTCGTCCTTGTCGTCTTAAGAAGCGTCCTCCT |
| | | GTTCGTUGA |
| Exemplary | 288 | ATGGCCGCCTTCAAGCCCAACCCCATCAACTACATCCTGGGCCTGGCCATCGGCATCGCCTCCGTGGGCTGGGCCATGGTGGA |
| open | | GATCGACGAGGAGGAGAACCCCATCCGGCTGATCGACCTGGGCGTGCGGGTGTTCGAGCGGGCCGAGGTGCCCAAGACCGGCG |
| reading | | ACTCCCTGGCCATGGCCCGGCGGCTGGCCCGGTCCGTGCGGCGGCTGACCCGGCGGCGGGCCCACCGGCTGCTGCGGGCCCGG |
| frame for | | CGGCTGCTGAAGCGGGAGGGCGTGCTGCAGGCCGCCGACTTCGACGAGAACGGCCTGATCAAGTCCCTGCCCAACACCCCCTG |
| Nme3Cas9 | | GCAGCTGCGGGCCGCCGCCCTGGACCGGAAGCTGACCCCCCTGGAGTGGTCCGCCGTGCTGCTGCACCTGATCAAGCACCGGG |
| dCas9 | | GCTACCTGTCCCAGCGGAAGAACGAGGGCGAGACCGCCGACAAGGAGCTGGGCGCCCTGCTGAAGGGCGTGGCCGACAACGCC |
| | | CACGCCCTGCAGACCGGCGACTTCCGGACCCCCGCCGAGCTGGCCCTGAACAAGTTCGAGAAGGAGTGCGGCCACATCCGGAA |
| | | CCAGCGGGGCGACTACTCCCACACCTTCTCCCGGAAGGACCTGCAGGCCGAGCTGAACCTGCTGTTCGAGAAGCAGAAGGAGT |
| | | TCGGCAACCCCCACGTGTCCGGCGGCCTGAAGGAGGGCATCGAGACCCTGCTGATGACCCAGCGGCCCGCCCTGTCCGGCGAC |
| | | GCCGTGCAGAAGATGCTGGGCCACTGCACCTTCGAGCCCGCCGAGCCCAAGGCCGCCAAGAACACCTACACCGCCGAGCGGTT |
| | | CATCTGGCTGACCAAGCTGAACAACCTGCGGATCCTGGAGCAGGGCTCCGAGCGGCCCCTGACCGACACCGAGCGGGCCACCC |
| | | TGATGGACGAGCCCTACCGGAAGTCCAAGCTGACCTACGCCCAGGCCCGGAAGCTGCTGTCCCTGGAGGACACCGCCTTCTTC |
| | | AAGGGCCTGCGGTACGGCAAGGACAACGCCGAGGCCTCCACCCTGATGGAGATGAAGGCCTACCACACCATCTCCCGGGCCCT |
| | | GGAGAAGGAGGGCCTGAAGGACAAGAAGTCCCCCCTGAACCTGTCCCCCGAGCTGCAGGACGAGATCGGCACCGCCTTCTCCC |
| | | TGTTCAAGACCGACGAGGACATCACCGGCCGGCTGAAGGACCGGATCCAGCCCGAGATCCTGGAGGCCCTGCTGAAGCACATC |
| | | TCCTTCGACAAGTTCGTGCAGATCTCCCTGAAGGCCCTGCGGCGGATCGTGCCCCTGATGGAGCAGGGCAAGCGGTACGACGA |
| | | GGCCTGCGCCGAGATCTACGGCGACCACTACGGCAAGAAGAACACCGAGGAGAAGATCTACCTGCCCCCCATCCCCGCCGACG |
| | | AGATCCGGAACCCCGTGGTGCTGCGGGCCCTGTCCCAGGCCCGGAAGGTGATCAACGGCGTGGTGCGGCGGTACGGCTCCCCC |
| | | GCCCGGATCCACATCGAGACCGCCCGGGAGGTGGGCAAGTCCTTCAAGGACCGGAAGGAGATCGAGAAGCGGCAGGAGGAGAA |
| | | CCGGAAGGACCGGGAGAAGGCCGCCGCCAAGTTCCGGGAGTACTTCCCCAACTTCGTGGGCGAGCCCAAGTCCAAGGACATCC |
| | | TGAAGCTGCGGCTGTACGAGCAGCAGCACGGCAAGTGCCTGTACTCCGGCAAGGAGATCAACCTGGGCCGGCTGAACGAGAAG |
| | | GGCTACGTGGAGATCGACGCCGCCCTGCCCTTCTCCCGGACCTGGGACGACTCCTTCAACAACAAGGTGCTGGTGCTGGGCTC |
| | | CGAGAACCAGAACAAGGGCAACCAGACCCCCTACGAGTACTTCAACGGCAAGGACAACTCCCGGGAGTGGCAGGAGTTCAAGG |
| | | CCCGGGTGGAGACCTCCCGGTTCCCCCGGTCCAAGAAGCAGCGGATCCTGCTGCAGAAGTTCGACGAGGACGGCTTCAAGGAG |
| | | CGGAACCTGAACGACACCCGGTACGTGAACCGGTTCCTGTGCCAGTTCGTGGCCGACCGGATGCGGCTGACCGGCAAGGGCAA |
| | | GAAGCGGGTGTTCGCCTCCAACGGCCAGATCACCAACCTGCTGCGGGGCTTCTGGGGCCTGCGGAAGGTGCGGGCCGAGAACG |
| | | ACCGGCACCACGCCCTGGACGCCGTGGTGGTGGCCTGCTCCACCGTGGCCATGCAGCAGAAGATCACCCGGTTCGTGCGGTAC |
| | | AAGGAGATGAACGCCTTCGACGGCAAGACCATCGACAAGGAGACCGGCGAGGTGCTGCACCAGAAGACCCACTTCCCCCAGCC |
| | | CTGGGAGTTCTTCGCCCAGGAGGTGATGATCCGGGTGTTCGGCAAGCCCGACGGCAAGCCCGAGTTCGAGGAGGCCGACACCC |
| | | CCGAGAAGCTGCGGACCCTGCTGGCCGAGAAGCTGTCCTCCCGGCCCGAGGCCGTGCACGAGTACGTGACCCCCCTGTTCGTG |
| | | TCCCGGGCCCCCAACCGGAAGATGTCCGGCCAGGGCCACATGGAGACCGTGAAGTCCGCCAAGCGGCTGGACGAGGGCGTGTC |
| | | CGTGCTGCGGGTGCCCCTGACCCAGCTGAAGCTGAAGGACCTGGAGAAGATGGTGAACCGGGAGCGGGAGCCCAAGCTGTACG |
| | | AGGCCCTGAAGGCCCGGCTGGAGGCCCACAAGGACGACCCCGCCAAGGCCTTCGCCGAGCCCTTCTACAAGTACGACAAGGCC |
| | | GGCAACCGGACCCAGCAGGTGAAGGCCGTGCGGGTGGAGCAGGTGCAGAAGACCGGCGTGTGGGTGCGGAACCACAACGGCAT |
| | | CGCCGACAACGCCACCATGGTGCGGGTGGACGTGTTCGAGAAGGGCGACAAGTACTACCTGGTGCCCATCTACTCCTGGCAGG |
| | | TGGCCAAGGGCATCCTGCCCGACCGGGCCGTGGTGGCCTACGCCGACGAGGAGGACTGGACCGTGATCGACGAGTCCTTCCGG |
| | | TTCAAGTTCGTGCTGTACTCCAACGACCTGATCAAGGTGCAGCTGAAGAAGGACTCCTTCCTGGGCTACTTCTCCGGCCTGGA |
| | | CCGGGCCACCGGCGCCATCTCCCTGCGGGAGCACGACCTGGAGAAGTCCAAGGGCAAGGACGGCATGCACCGGATCGGCGTGA |
| | | AGACCGCCCTGTCCTTCCAGAAGTACCAGATCGACGAGATGGGCAAGGAGATCCGGCCCTGCCGGCTGAAGAAGCGGCCCCCC |
| | | GTGCGGUGA |
| Exemplary | 289 | ATGGCAGCATTCAAACCAAACCCAATCAACTACATCCTAGGACTAGCAATCGGAATCGCATCAGTAGGATGAGCAATGGTAGA |
| open | | AATCGACGAAGAAGAAAACCCAATCCGACTAATCGACCTAGGAGTACGAGTATTCGAACGAGCAGAAGTACCAAAAACAGGAG |
| reading | | ACTCACTAGCAATGGCACGACGACTAGCACGATCAGTACGACGACTAACACGACGACGAGCACACCGACTACTACGAGCACGA |
| frame for | | CGACTACTAAAACGAGAAGGAGTACTACAAGCAGCAGACTTCGACGAAAACGGACTAATCAAATCACTACCAAACACACCATG |
| Nme3Cas9 | | ACAACTACGAGCAGCAGCACTAGACCGAAAACTAACACCACTAGAATGATCAGCAGTACTACTACACCTAATCAAACACCGAG |
| dCas9 | | GATACCTATCACAACGAAAAAACGAAGGAGAAACAGCAGACAAAGAACTAGGAGCACTACTAAAAGGAGTAGCAGACAACGCA |
| | | CACGCACTACAAACAGGAGACTTCCGAACACCAGCAGAACTAGCACTAAACAAATTCGAAAAAGAATGCGGACACATCCGAAA |
| | | CCAACGAGGAGACTACTCACACACATTCTCACGAAAAGACCTACAAGCAGAACTAAACCTACTATTCGAAAAACAAAAAGAAT |
| | | TCGGAAACCCACACGTATCAGGAGGACTAAAAGAAGGAATCGAAACACTACTAATGACACAACGACCAGCACTATCAGGAGAC |
| | | GCAGTACAAAAAATGCTAGGACACTGCACATTCGAACCAGCAGAACCAAAAGCAGCAAAAAACACATACACAGCAGAACGATT |
| | | CATCTGACTAACAAAACTAAACAACCTACGAATCCTAGAACAAGGATCAGAACGACCACTAACAGACACAGAACGAGCAACAC |
| | | TAATGGACGAACCATACCGAAAATCAAAACTAACATACGCACAAGCACGAAAACTACTATCACTAGAAGACACAGCATTCTTC |
| | | AAAGGACTACGATACGGAAAAGACAACGCAGAAGCATCAACACTAATGGAAATGAAAGCATACCACACAATCTCACGAGCACT |
| | | AGAAAAAGAAGGACTAAAAGACAAAAAATCACCACTAAACCTATCACCAGAACTACAAGACGAAATCGGAACAGCATTCTCAC |
| | | TATTCAAAACAGACGAAGACATCACAGGACGACTAAAAGACCGAATCCAACCAGAAATCCTAGAAGCACTACTAAAACACATC |
| | | TCATTCGACAAATTCGTACAAATCTCACTAAAAGCACTACGACGAATCGTACCACTAATGGAACAAGGAAAACGATACGACGA |
| | | AGCATGCGCAGAAATCTACGGAGACCACTACGGAAAAAAAAACACAGAAGAAAAAATCTACCTACCACCAATCCCAGCAGACG |
| | | AAATCCGAAACCCAGTAGTACTACGAGCACTATCACAAGCACGAAAAGTAATCAACGGAGTAGTACGACGATACGGATCACCA |
| | | GCACGAATCCACATCGAAACAGCACGAGAAGTAGGAAAATCATTCAAAGACCGAAAAGAAATCGAAAAACGACAAGAAGAAAA |
| | | CCGAAAAGACCGAGAAAAAGCAGCAGCAAAATTCCGAGAATACTTCCCAAACTTCGTAGGAGAACCAAAATCAAAAGACATCC |
| | | TAAAACTACGACTATACGAACAACAACACGGAAAATGCCTATACTCAGGAAAAGAAATCAACCTAGGACGACTAAACGAAAAA |
| | | GGATACGTAGAAATCGACGCAGCACTACCATTCTCACGAACATGAGACGACTCATTCAACAACAAAGTACTAGTACTAGGATC |
| | | AGAAAACCAAAACAAAGGAAACCAAACACCATACGAATACTTCAACGGAAAAGACAACTCACGAGAATGACAAGAATTCAAAG |
| | | CACGAGTAGAAACATCACGATTCCCACGATCAAAAAAACAACGAATCCTACTACAAAAATTCGACGAAGACGGATTCAAAGAA |
| | | CGAAACCTAAACGACACACGATACGTAAACCGATTCCTATGCCAATTCGTAGCAGACCGAATGCGACTAACAGGAAAAGGAAA |
| | | AAAACGAGTATTCGCATCAAACGGACAAATCACAAACCTACTACGAGGATTCTGAGGACTACGAAAAGTACGAGCAGAAAACG |
| | | ACCGACACCACGCACTAGACGCAGTAGTAGTAGCATGCTCAACAGTAGCAATGCAACAAAAAATCACACGATTCGTACGATAC |
| | | AAAGAAATGAACGCATTCGACGGAAAAACAATCGACAAAGAAACAGGAGAAGTACTACACCAAAAAACACACTTCCCACAACC |
| | | ATGAGAATTCTTCGCACAAGAAGTAATGATCCGAGTATTCGGAAAACCAGACGGAAAACCAGAATTCGAAGAAGCAGACACAC |
| | | CAGAAAAACTACGAACACTACTAGCAGAAAAACTATCATCACGACCAGAAGCAGTACACGAATACGTAACACCACTATTCGTA |
| | | TCACGAGCACCAAACCGAAAAATGTCAGGACAAGGACACATGGAAACAGTAAAATCAGCAAAACGACTAGACGAAGGAGTATC |
| | | AGTACTACGAGTACCACTAACACAACTAAAACTAAAAGACCTAGAAAAAATGGTAAACCGAGAACGAGAACCAAAACTATACG |
| | | AAGCACTAAAAGCACGACTAGAAGCACACAAAGACGACCCAGCAAAAGCATTCGCAGAACCATTCTACAAATACGACAAAGCA |
| | | GGAAACCGAACACAACAAGTAAAAGCAGTACGAGTAGAACAAGTACAAAAAACAGGAGTATGAGTACGAAACCACAACGGAAT |
| | | CGCAGACAACGCAACAATGGTACGAGTAGACGTATTCGAAAAAGGAGACAAATACTACCTAGTACCAATCTACTCATGACAAG |
| | | TAGCAAAAGGAATCCTACCAGACCGAGCAGTAGTAGCATACGCAGACGAAGAAGACTGAACAGTAATCGACGAATCATTCCGA |
| | | TTCAAATTCGTACTATACTCAAACGACCTAATCAAAGTACAACTAAAAAAAGACTCATTCCTAGGATACTTCTCAGGACTAGA |
| | | CCGAGCAACAGGAGCAATCTCACTACGAGAACACGACCTAGAAAAATCAAAAGGAAAAGACGGAATGCACCGAATCGGAGTAA |
| | | AAACAGCACTATCATTCCAAAAATACCAAATCGACGAAATGGGAAAAGAAATCCGACCATGCCGACTAAAAAAACGACCACCA |
| | | GTACGAUAA |
| Exemplary | 290 | MAAFKPNPINYILGLAIGIASVGWAMVEIDEEENPIRLIDLGVRVFERAEVPKTGDSLAMARRLARSVRRLTRRRAHRLLRAR |
| amino | | RLLKREGVLQAADFDENGLIKSLPNTPWQLRAAALDRKLTPLEWSAVLLHLIKHRGYLSQRKNEGETADKELGALLKGVADNA |
| acid | | HALQTGDFRTPAELALNKFEKECGHIRNQRGDYSHTFSRKDLQAELNLLFEKQKEFGNPHVSGGLKEGIETLLMTQRPALSGD |
| sequence | | AVQKMLGHCTFEPAEPKAAKNTYTAERFIWLTKLNNLRILEQGSERPLTDTERATLMDEPYRKSKLTYAQARKLLSLEDTAFF |
| of | | KGLRYGKDNAEASTLMEMKAYHTISRALEKEGLKDKKSPLNLSPELQDEIGTAFSLEKTDEDITGRLKDRIQPEILEALLKHI |
| Nme3Cas9 | | SFDKFVQISLKALRRIVPLMEQGKRYDEACAEIYGDHYGKKNTEEKIYLPPIPADEIRNPVVLRALSQARKVINGVVRRYGSP |
| RuvC | | ARIHIETAREVGKSFKDRKEIEKRQEENRKDREKAAAKFREYFPNFVGEPKSKDILKLRLYEQQHGKCLYSGKEINLGRLNEK |
| nickase | | GYVEIDHALPFSRTWDDSFNNKVLVLGSENQNKGNQTPYEYENGKDNSREWQEFKARVETSRFPRSKKQRILLQKFDEDGEKE |
| | | RNLNDTRYVNRFLCQFVADRMRLTGKGKKRVFASNGQITNLLRGFWGLRKVRAENDRHHALDAVVVACSTVAMQQKITRFVRY |
| | | KEMNAFDGKTIDKETGEVLHQKTHEPQPWEFFAQEVMIRVFGKPDGKPEFEEADTPEKLRTLLAEKLSSRPEAVHEYVTPLFV |
| | | SRAPNRKMSGQGHMETVKSAKRLDEGVSVLRVPLTQLKLKDLEKMVNREREPKLYEALKARLEAHKDDPAKAFAEPFYKYDKA |
| | | GNRTQQVKAVRVEQVQKTGVWVRNHNGIADNATMVRVDVFEKGDKYYLVPIYSWQVAKGILPDRAVVAYADEEDWTVIDESFR |
| | | FKFVLYSNDLIKVQLKKDSFLGYESGLDRATGAISLREHDLEKSKGKDGMHRIGVKTALSFQKYQIDEMGKEIRPCRLKKRPP |
| | | VR |
| Exemplary | 291 | GCTGCTTTTAAGCCTAATCCTATTAATTATATTCTTGGTCTTGCTATTGGTATTGCTTCTGTTGGTTGGGCTATGGTTGAGAT |
| coding | | TGATGAGGAGGAGAATCCTATTCGTCTTATTGATCTTGGTGTTCGTGTTTTTGAGCGTGCTGAGGTTCCTAAGACTGGTGATT |
| sequence | | CTCTTGCTATGGCTCGTCGTCTTGCTCGTTCTGTTCGTCGTCTTACTCGTCGTCGTGCTCATCGTCTTCTTCGTGCTCGTCGT |
| encoding | | CTTCTTAAGCGTGAGGGTGTTCTTCAGGCTGCTGATTTTGATGAGAATGGTCTTATTAAGTCTCTTCCTAATACTCCTTGGCA |
| Nme3Cas9 | | GCTTCGTGCTGCTGCTCTTGATCGTAAGCTTACTCCTCTTGAGTGGTCTGCTGTTCTTCTTCATCTTATTAAGCATCGTGGTT |
| RuvC | | ATCTTTCTCAGCGTAAGAATGAGGGTGAGACTGCTGATAAGGAGCTTGGTGCTCTTCTTAAGGGTGTTGCTGATAATGCTCAT |
| nickase | | GCTCTTCAGACTGGTGATTTTCGTACTCCTGCTGAGCTTGCTCTTAATAAGTTTGAGAAGGAGTGTGGTCATATTCGTAATCA |
| | | GCGTGGTGATTATTCTCATACTTTTTCTCGTAAGGATCTTCAGGCTGAGCTTAATCTTCTTTTTGAGAAGCAGAAGGAGTTTG |
| | | GTAATCCTCATGTTTCTGGTGGTCTTAAGGAGGGTATTGAGACTCTTCTTATGACTCAGCGTCCTGCTCTTTCTGGTGATGCT |
| | | GTTCAGAAGATGCTTGGTCATTGTACTTTTGAGCCTGCTGAGCCTAAGGCTGCTAAGAATACTTATACTGCTGAGCGTTTTAT |
| | | TTGGCTTACTAAGCTTAATAATCTTCGTATTCTTGAGCAGGGTTCTGAGCGTCCTCTTACTGATACTGAGCGTGCTACTCTTA |
| | | TGGATGAGCCTTATCGTAAGTCTAAGCTTACTTATGCTCAGGCTCGTAAGCTTCTTTCTCTTGAGGATACTGCTTTTTTTAAG |
| | | GGTCTTCGTTATGGTAAGGATAATGCTGAGGCTTCTACTCTTATGGAGATGAAGGCTTATCATACTATTTCTCGTGCTCTTGA |
| | | GAAGGAGGGTCTTAAGGATAAGAAGTCTCCTCTTAATCTTTCTCCTGAGCTTCAGGATGAGATTGGTACTGCTTTTTCTCTTT |
| | | TTAAGACTGATGAGGATATTACTGGTCGTCTTAAGGATCGTATTCAGCCTGAGATTCTTGAGGCTCTTCTTAAGCATATTTCT |
| | | TTTGATAAGTTTGTTCAGATTTCTCTTAAGGCTCTTCGTCGTATTGTTCCTCTTATGGAGCAGGGTAAGCGTTATGATGAGGC |
| | | TTGTGCTGAGATTTATGGTGATCATTATGGTAAGAAGAATACTGAGGAGAAGATTTATCTTCCTCCTATTCCTGCTGATGAGA |
| | | TTCGTAATCCTGTTGTTCTTCGTGCTCTTTCTCAGGCTCGTAAGGTTATTAATGGTGTTGTTCGTCGTTATGGTTCTCCTGCT |
| | | CGTATTCATATTGAGACTGCTCGTGAGGTTGGTAAGTCTTTTAAGGATCGTAAGGAGATTGAGAAGCGTCAGGAGGAGAATCG |
| | | TAAGGATCGTGAGAAGGCTGCTGCTAAGTTTCGTGAGTATTTTCCTAATTTTGTTGGTGAGCCTAAGTCTAAGGATATTCTTA |
| | | AGCTTCGTCTTTATGAGCAGCAGCATGGTAAGTGTCTTTATTCTGGTAAGGAGATTAATCTTGGTCGTCTTAATGAGAAGGGT |
| | | TATGTTGAGATTGATCATGCTCTTCCTTTTTCTCGTACTTGGGATGATTCTTTTAATAATAAGGTTCTTGTTCTTGGTTCTGA |
| | | GAATCAGAATAAGGGTAATCAGACTCCTTATGAGTATTTTAATGGTAAGGATAATTCTCGTGAGTGGCAGGAGTTTAAGGCTC |
| | | GTGTTGAGACTTCTCGTTTTCCTCGTTCTAAGAAGCAGCGTATTCTTCTTCAGAAGTTTGATGAGGATGGTTTTAAGGAGCGT |
| | | AATCTTAATGATACTCGTTATGTTAATCGTTTTCTTTGTCAGTTTGTTGCTGATCGTATGCGTCTTACTGGTAAGGGTAAGAA |
| | | GCGTGTTTTTGCTTCTAATGGTCAGATTACTAATCTTCTTCGTGGTTTTTGGGGTCTTCGTAAGGTTCGTGCTGAGAATGATC |
| | | GTCATCATGCTCTTGATGCTGTTGTTGTTGCTTGTTCTACTGTTGCTATGCAGCAGAAGATTACTCGTTTTGTTCGTTATAAG |
| | | GAGATGAATGCTTTTGATGGTAAGACTATTGATAAGGAGACTGGTGAGGTTCTTCATCAGAAGACTCATTTTCCTCAGCCTTG |
| | | GGAGTTTTTTGCTCAGGAGGTTATGATTCGTGTTTTTGGTAAGCCTGATGGTAAGCCTGAGTTTGAGGAGGCTGATACTCCTG |
| | | AGAAGCTTCGTACTCTTCTTGCTGAGAAGCTTTCTTCTCGTCCTGAGGCTGTTCATGAGTATGTTACTCCTCTTTTTGTTTCT |
| | | CGTGCTCCTAATCGTAAGATGTCTGGTCAGGGTCATATGGAGACTGTTAAGTCTGCTAAGCGTCTTGATGAGGGTGTTTCTGT |
| | | TCTTCGTGTTCCTCTTACTCAGCTTAAGCTTAAGGATCTTGAGAAGATGGTTAATCGTGAGCGTGAGCCTAAGCTTTATGAGG |
| | | CTCTTAAGGCTCGTCTTGAGGCTCATAAGGATGATCCTGCTAAGGCTTTTGCTGAGCCTTTTTATAAGTATGATAAGGCTGGT |
| | | AATCGTACTCAGCAGGTTAAGGCTGTTCGTGTTGAGCAGGTTCAGAAGACTGGTGTTTGGGTTCGTAATCATAATGGTATTGC |
| | | TGATAATGCTACTATGGTTCGTGTTGATGTTTTTGAGAAGGGTGATAAGTATTATCTTGTTCCTATTTATTCTTGGCAGGTTG |
| | | CTAAGGGTATTCTTCCTGATCGTGCTGTTGTTGCTTATGCTGATGAGGAGGATTGGACTGTTATTGATGAGTCTTTTCGTTTT |
| | | AAGTTTGTTCTTTATTCTAATGATCTTATTAAGGTTCAGCTTAAGAAGGATTCTTTTCTTGGTTATTTTTCTGGTCTTGATCG |
| | | TGCTACTGGTGCTATTTCTCTTCGTGAGCATGATCTTGAGAAGTCTAAGGGTAAGGATGGTATGCATCGTATTGGTGTTAAGA |
| | | CTGCTCTTTCTTTTCAGAAGTATCAGATTGATGAGATGGGTAAGGAGATTCGTCCTTGTCGTCTTAAGAAGCGTCCTCCTGTT |
| | | CGT |
| Exemplary | 292 | GCCGCCTTCAAGCCCAACCCCATCAACTACATCCTGGGCCTGGCCATCGGCATCGCCTCCGTGGGCTGGGCCATGGTGGAGAT |
| coding | | CGACGAGGAGGAGAACCCCATCCGGCTGATCGACCTGGGCGTGCGGGTGTTCGAGCGGGCCGAGGTGCCCAAGACCGGCGACT |
| sequence | | CCCTGGCCATGGCCCGGCGGCTGGCCCGGTCCGTGCGGCGGCTGACCCGGCGGCGGGCCCACCGGCTGCTGCGGGCCCGGCGG |
| encoding | | CTGCTGAAGCGGGAGGGCGTGCTGCAGGCCGCCGACTTCGACGAGAACGGCCTGATCAAGTCCCTGCCCAACACCCCCTGGCA |
| Nme3Cas9 | | GCTGCGGGCCGCCGCCCTGGACCGGAAGCTGACCCCCCTGGAGTGGTCCGCCGTGCTGCTGCACCTGATCAAGCACCGGGGCT |
| RuvC | | ACCTGTCCCAGCGGAAGAACGAGGGCGAGACCGCCGACAAGGAGCTGGGCGCCCTGCTGAAGGGCGTGGCCGACAACGCCCAC |
| nickase | | GCCCTGCAGACCGGCGACTTCCGGACCCCCGCCGAGCTGGCCCTGAACAAGTTCGAGAAGGAGTGCGGCCACATCCGGAACCA |
| | | GCGGGGCGACTACTCCCACACCTTCTCCCGGAAGGACCTGCAGGCCGAGCTGAACCTGCTGTTCGAGAAGCAGAAGGAGTTCG |
| | | GCAACCCCCACGTGTCCGGCGGCCTGAAGGAGGGCATCGAGACCCTGCTGATGACCCAGCGGCCCGCCCTGTCCGGCGACGCC |
| | | GTGCAGAAGATGCTGGGCCACTGCACCTTCGAGCCCGCCGAGCCCAAGGCCGCCAAGAACACCTACACCGCCGAGCGGTTCAT |
| | | CTGGCTGACCAAGCTGAACAACCTGCGGATCCTGGAGCAGGGCTCCGAGCGGCCCCTGACCGACACCGAGCGGGCCACCCTGA |
| | | TGGACGAGCCCTACCGGAAGTCCAAGCTGACCTACGCCCAGGCCCGGAAGCTGCTGTCCCTGGAGGACACCGCCTTCTTCAAG |
| | | GGCCTGCGGTACGGCAAGGACAACGCCGAGGCCTCCACCCTGATGGAGATGAAGGCCTACCACACCATCTCCCGGGCCCTGGA |
| | | GAAGGAGGGCCTGAAGGACAAGAAGTCCCCCCTGAACCTGTCCCCCGAGCTGCAGGACGAGATCGGCACCGCCTTCTCCCTGT |
| | | TCAAGACCGACGAGGACATCACCGGCCGGCTGAAGGACCGGATCCAGCCCGAGATCCTGGAGGCCCTGCTGAAGCACATCTCC |
| | | TTCGACAAGTTCGTGCAGATCTCCCTGAAGGCCCTGCGGCGGATCGTGCCCCTGATGGAGCAGGGCAAGCGGTACGACGAGGC |
| | | CTGCGCCGAGATCTACGGCGACCACTACGGCAAGAAGAACACCGAGGAGAAGATCTACCTGCCCCCCATCCCCGCCGACGAGA |
| | | TCCGGAACCCCGTGGTGCTGCGGGCCCTGTCCCAGGCCCGGAAGGTGATCAACGGCGTGGTGCGGCGGTACGGCTCCCCCGCC |
| | | CGGATCCACATCGAGACCGCCCGGGAGGTGGGCAAGTCCTTCAAGGACCGGAAGGAGATCGAGAAGCGGCAGGAGGAGAACCG |
| | | GAAGGACCGGGAGAAGGCCGCCGCCAAGTTCCGGGAGTACTTCCCCAACTTCGTGGGCGAGCCCAAGTCCAAGGACATCCTGA |
| | | AGCTGCGGCTGTACGAGCAGCAGCACGGCAAGTGCCTGTACTCCGGCAAGGAGATCAACCTGGGCCGGCTGAACGAGAAGGGC |
| | | TACGTGGAGATCGACCACGCCCTGCCCTTCTCCCGGACCTGGGACGACTCCTTCAACAACAAGGTGCTGGTGCTGGGCTCCGA |
| | | GAACCAGAACAAGGGCAACCAGACCCCCTACGAGTACTTCAACGGCAAGGACAACTCCCGGGAGTGGCAGGAGTTCAAGGCCC |
| | | GGGTGGAGACCTCCCGGTTCCCCCGGTCCAAGAAGCAGCGGATCCTGCTGCAGAAGTTCGACGAGGACGGCTTCAAGGAGCGG |
| | | AACCTGAACGACACCCGGTACGTGAACCGGTTCCTGTGCCAGTTCGTGGCCGACCGGATGCGGCTGACCGGCAAGGGCAAGAA |
| | | GCGGGTGTTCGCCTCCAACGGCCAGATCACCAACCTGCTGCGGGGCTTCTGGGGCCTGCGGAAGGTGCGGGCCGAGAACGACC |
| | | GGCACCACGCCCTGGACGCCGTGGTGGTGGCCTGCTCCACCGTGGCCATGCAGCAGAAGATCACCCGGTTCGTGCGGTACAAG |
| | | GAGATGAACGCCTTCGACGGCAAGACCATCGACAAGGAGACCGGCGAGGTGCTGCACCAGAAGACCCACTTCCCCCAGCCCTG |
| | | GGAGTTCTTCGCCCAGGAGGTGATGATCCGGGTGTTCGGCAAGCCCGACGGCAAGCCCGAGTTCGAGGAGGCCGACACCCCCG |
| | | AGAAGCTGCGGACCCTGCTGGCCGAGAAGCTGTCCTCCCGGCCCGAGGCCGTGCACGAGTACGTGACCCCCCTGTTCGTGTCC |
| | | CGGGCCCCCAACCGGAAGATGTCCGGCCAGGGCCACATGGAGACCGTGAAGTCCGCCAAGCGGCTGGACGAGGGCGTGTCCGT |
| | | GCTGCGGGTGCCCCTGACCCAGCTGAAGCTGAAGGACCTGGAGAAGATGGTGAACCGGGAGCGGGAGCCCAAGCTGTACGAGG |
| | | CCCTGAAGGCCCGGCTGGAGGCCCACAAGGACGACCCCGCCAAGGCCTTCGCCGAGCCCTTCTACAAGTACGACAAGGCCGGC |
| | | AACCGGACCCAGCAGGTGAAGGCCGTGCGGGTGGAGCAGGTGCAGAAGACCGGCGTGTGGGTGCGGAACCACAACGGCATCGC |
| | | CGACAACGCCACCATGGTGCGGGTGGACGTGTTCGAGAAGGGCGACAAGTACTACCTGGTGCCCATCTACTCCTGGCAGGTGG |
| | | CCAAGGGCATCCTGCCCGACCGGGCCGTGGTGGCCTACGCCGACGAGGAGGACTGGACCGTGATCGACGAGTCCTTCCGGTTC |
| | | AAGTTCGTGCTGTACTCCAACGACCTGATCAAGGTGCAGCTGAAGAAGGACTCCTTCCTGGGCTACTTCTCCGGCCTGGACCG |
| | | GGCCACCGGCGCCATCTCCCTGCGGGAGCACGACCTGGAGAAGTCCAAGGGCAAGGACGGCATGCACCGGATCGGCGTGAAGA |
| | | CCGCCCTGTCCTTCCAGAAGTACCAGATCGACGAGATGGGCAAGGAGATCCGGCCCTGCCGGCTGAAGAAGCGGCCCCCCGTG |
| | | CGG |
| Exemplary | 293 | GCAGCATTCAAACCAAACCCAATCAACTACATCCTAGGACTAGCAATCGGAATCGCATCAGTAGGATGAGCAATGGTAGAAAT |
| coding | | CGACGAAGAAGAAAACCCAATCCGACTAATCGACCTAGGAGTACGAGTATTCGAACGAGCAGAAGTACCAAAAACAGGAGACT |
| sequence | | CACTAGCAATGGCACGACGACTAGCACGATCAGTACGACGACTAACACGACGACGAGCACACCGACTACTACGAGCACGACGA |
| encoding | | CTACTAAAACGAGAAGGAGTACTACAAGCAGCAGACTTCGACGAAAACGGACTAATCAAATCACTACCAAACACACCATGACA |
| Nme3Cas9 | | ACTACGAGCAGCAGCACTAGACCGAAAACTAACACCACTAGAATGATCAGCAGTACTACTACACCTAATCAAACACCGAGGAT |
| Ruvc | | ACCTATCACAACGAAAAAACGAAGGAGAAACAGCAGACAAAGAACTAGGAGCACTACTAAAAGGAGTAGCAGACAACGCACAC |
| nickase | | GCACTACAAACAGGAGACTTCCGAACACCAGCAGAACTAGCACTAAACAAATTCGAAAAAGAATGCGGACACATCCGAAACCA |
| | | ACGAGGAGACTACTCACACACATTCTCACGAAAAGACCTACAAGCAGAACTAAACCTACTATTCGAAAAACAAAAAGAATTCG |
| | | GAAACCCACACGTATCAGGAGGACTAAAAGAAGGAATCGAAACACTACTAATGACACAACGACCAGCACTATCAGGAGACGCA |
| | | GTACAAAAAATGCTAGGACACTGCACATTCGAACCAGCAGAACCAAAAGCAGCAAAAAACACATACACAGCAGAACGATTCAT |
| | | CTGACTAACAAAACTAAACAACCTACGAATCCTAGAACAAGGATCAGAACGACCACTAACAGACACAGAACGAGCAACACTAA |
| | | TGGACGAACCATACCGAAAATCAAAACTAACATACGCACAAGCACGAAAACTACTATCACTAGAAGACACAGCATTCTTCAAA |
| | | GGACTACGATACGGAAAAGACAACGCAGAAGCATCAACACTAATGGAAATGAAAGCATACCACACAATCTCACGAGCACTAGA |
| | | AAAAGAAGGACTAAAAGACAAAAAATCACCACTAAACCTATCACCAGAACTACAAGACGAAATCGGAACAGCATTCTCACTAT |
| | | TCAAAACAGACGAAGACATCACAGGACGACTAAAAGACCGAATCCAACCAGAAATCCTAGAAGCACTACTAAAACACATCTCA |
| | | TTCGACAAATTCGTACAAATCTCACTAAAAGCACTACGACGAATCGTACCACTAATGGAACAAGGAAAACGATACGACGAAGC |
| | | ATGCGCAGAAATCTACGGAGACCACTACGGAAAAAAAAACACAGAAGAAAAAATCTACCTACCACCAATCCCAGCAGACGAAA |
| | | TCCGAAACCCAGTAGTACTACGAGCACTATCACAAGCACGAAAAGTAATCAACGGAGTAGTACGACGATACGGATCACCAGCA |
| | | CGAATCCACATCGAAACAGCACGAGAAGTAGGAAAATCATTCAAAGACCGAAAAGAAATCGAAAAACGACAAGAAGAAAACCG |
| | | AAAAGACCGAGAAAAAGCAGCAGCAAAATTCCGAGAATACTTCCCAAACTTCGTAGGAGAACCAAAATCAAAAGACATCCTAA |
| | | AACTACGACTATACGAACAACAACACGGAAAATGCCTATACTCAGGAAAAGAAATCAACCTAGGACGACTAAACGAAAAAGGA |
| | | TACGTAGAAATCGACCACGCACTACCATTCTCACGAACATGAGACGACTCATTCAACAACAAAGTACTAGTACTAGGATCAGA |
| | | AAACCAAAACAAAGGAAACCAAACACCATACGAATACTTCAACGGAAAAGACAACTCACGAGAATGACAAGAATTCAAAGCAC |
| | | GAGTAGAAACATCACGATTCCCACGATCAAAAAAACAACGAATCCTACTACAAAAATTCGACGAAGACGGATTCAAAGAACGA |
| | | AACCTAAACGACACACGATACGTAAACCGATTCCTATGCCAATTCGTAGCAGACCGAATGCGACTAACAGGAAAAGGAAAAAA |
| | | ACGAGTATTCGCATCAAACGGACAAATCACAAACCTACTACGAGGATTCTGAGGACTACGAAAAGTACGAGCAGAAAACGACC |
| | | GACACCACGCACTAGACGCAGTAGTAGTAGCATGCTCAACAGTAGCAATGCAACAAAAAATCACACGATTCGTACGATACAAA |
| | | GAAATGAACGCATTCGACGGAAAAACAATCGACAAAGAAACAGGAGAAGTACTACACCAAAAAACACACTTCCCACAACCATG |
| | | AGAATTCTTCGCACAAGAAGTAATGATCCGAGTATTCGGAAAACCAGACGGAAAACCAGAATTCGAAGAAGCAGACACACCAG |
| | | AAAAACTACGAACACTACTAGCAGAAAAACTATCATCACGACCAGAAGCAGTACACGAATACGTAACACCACTATTCGTATCA |
| | | CGAGCACCAAACCGAAAAATGTCAGGACAAGGACACATGGAAACAGTAAAATCAGCAAAACGACTAGACGAAGGAGTATCAGT |
| | | ACTACGAGTACCACTAACACAACTAAAACTAAAAGACCTAGAAAAAATGGTAAACCGAGAACGAGAACCAAAACTATACGAAG |
| | | CACTAAAAGCACGACTAGAAGCACACAAAGACGACCCAGCAAAAGCATTCGCAGAACCATTCTACAAATACGACAAAGCAGGA |
| | | AACCGAACACAACAAGTAAAAGCAGTACGAGTAGAACAAGTACAAAAAACAGGAGTATGAGTACGAAACCACAACGGAATCGC |
| | | AGACAACGCAACAATGGTACGAGTAGACGTATTCGAAAAAGGAGACAAATACTACCTAGTACCAATCTACTCATGACAAGTAG |
| | | CAAAAGGAATCCTACCAGACCGAGCAGTAGTAGCATACGCAGACGAAGAAGACTGAACAGTAATCGACGAATCATTCCGATTC |
| | | AAATTCGTACTATACTCAAACGACCTAATCAAAGTACAACTAAAAAAAGACTCATTCCTAGGATACTTCTCAGGACTAGACCG |
| | | AGCAACAGGAGCAATCTCACTACGAGAACACGACCTAGAAAAATCAAAAGGAAAAGACGGAATGCACCGAATCGGAGTAAAAA |
| | | CAGCACTATCATTCCAAAAATACCAAATCGACGAAATGGGAAAAGAAATCCGACCATGCCGACTAAAAAAACGACCACCAGTA |
| | | CGA |
| Exemplary | 294 | ATGGCTGCTTTTAAGCCTAATCCTATTAATTATATTCTTGGTCTTGCTATTGGTATTGCTTCTGTTGGTTGGGCTATGGTTGA |
| open | | GATTGATGAGGAGGAGAATCCTATTCGTCTTATTGATCTTGGTGTTCGTGTTTTTGAGCGTGCTGAGGTTCCTAAGACTGGTG |
| reading | | ATTCTCTTGCTATGGCTCGTCGTCTTGCTCGTTCTGTTCGTCGTCTTACTCGTCGTCGTGCTCATCGTCTTCTTCGTGCTCGT |
| frame for | | CGTCTTCTTAAGCGTGAGGGTGTTCTTCAGGCTGCTGATTTTGATGAGAATGGTCTTATTAAGTCTCTTCCTAATACTCCTTG |
| Nme3Cas9 | | GCAGCTTCGTGCTGCTGCTCTTGATCGTAAGCTTACTCCTCTTGAGTGGTCTGCTGTTCTTCTTCATCTTATTAAGCATCGTG |
| RuvC | | GTTATCTTTCTCAGCGTAAGAATGAGGGTGAGACTGCTGATAAGGAGCTTGGTGCTCTTCTTAAGGGTGTTGCTGATAATGCT |
| nickase | | CATGCTCTTCAGACTGGTGATTTTCGTACTCCTGCTGAGCTTGCTCTTAATAAGTTTGAGAAGGAGTGTGGTCATATTCGTAA |
| | | TCAGCGTGGTGATTATTCTCATACTTTTTCTCGTAAGGATCTTCAGGCTGAGCTTAATCTTCTTTTTGAGAAGCAGAAGGAGT |
| | | TTGGTAATCCTCATGTTTCTGGTGGTCTTAAGGAGGGTATTGAGACTCTTCTTATGACTCAGCGTCCTGCTCTTTCTGGTGAT |
| | | GCTGTTCAGAAGATGCTTGGTCATTGTACTTTTGAGCCTGCTGAGCCTAAGGCTGCTAAGAATACTTATACTGCTGAGCGTTT |
| | | TATTTGGCTTACTAAGCTTAATAATCTTCGTATTCTTGAGCAGGGTTCTGAGCGTCCTCTTACTGATACTGAGCGTGCTACTC |
| | | TTATGGATGAGCCTTATCGTAAGTCTAAGCTTACTTATGCTCAGGCTCGTAAGCTTCTTTCTCTTGAGGATACTGCTTTTTTT |
| | | AAGGGTCTTCGTTATGGTAAGGATAATGCTGAGGCTTCTACTCTTATGGAGATGAAGGCTTATCATACTATTTCTCGTGCTCT |
| | | TGAGAAGGAGGGTCTTAAGGATAAGAAGTCTCCTCTTAATCTTTCTCCTGAGCTTCAGGATGAGATTGGTACTGCTTTTTCTC |
| | | TTTTTAAGACTGATGAGGATATTACTGGTCGTCTTAAGGATCGTATTCAGCCTGAGATTCTTGAGGCTCTTCTTAAGCATATT |
| | | TCTTTTGATAAGTTTGTTCAGATTTCTCTTAAGGCTCTTCGTCGTATTGTTCCTCTTATGGAGCAGGGTAAGCGTTATGATGA |
| | | GGCTTGTGCTGAGATTTATGGTGATCATTATGGTAAGAAGAATACTGAGGAGAAGATTTATCTTCCTCCTATTCCTGCTGATG |
| | | AGATTCGTAATCCTGTTGTTCTTCGTGCTCTTTCTCAGGCTCGTAAGGTTATTAATGGTGTTGTTCGTCGTTATGGTTCTCCT |
| | | GCTCGTATTCATATTGAGACTGCTCGTGAGGTTGGTAAGTCTTTTAAGGATCGTAAGGAGATTGAGAAGCGTCAGGAGGAGAA |
| | | TCGTAAGGATCGTGAGAAGGCTGCTGCTAAGTTTCGTGAGTATTTTCCTAATTTTGTTGGTGAGCCTAAGTCTAAGGATATTC |
| | | TTAAGCTTCGTCTTTATGAGCAGCAGCATGGTAAGTGTCTTTATTCTGGTAAGGAGATTAATCTTGGTCGTCTTAATGAGAAG |
| | | GGTTATGTTGAGATTGATCATGCTCTTCCTTTTTCTCGTACTTGGGATGATTCTTTTAATAATAAGGTTCTTGTTCTTGGTTC |
| | | TGAGAATCAGAATAAGGGTAATCAGACTCCTTATGAGTATTTTAATGGTAAGGATAATTCTCGTGAGTGGCAGGAGTTTAAGG |
| | | CTCGTGTTGAGACTTCTCGTTTTCCTCGTTCTAAGAAGCAGCGTATTCTTCTTCAGAAGTTTGATGAGGATGGTTTTAAGGAG |
| | | CGTAATCTTAATGATACTCGTTATGTTAATCGTTTTCTTTGTCAGTTTGTTGCTGATCGTATGCGTCTTACTGGTAAGGGTAA |
| | | GAAGCGTGTTTTTGCTTCTAATGGTCAGATTACTAATCTTCTTCGTGGTTTTTGGGGTCTTCGTAAGGTTCGTGCTGAGAATG |
| | | ATCGTCATCATGCTCTTGATGCTGTTGTTGTTGCTTGTTCTACTGTTGCTATGCAGCAGAAGATTACTCGTTTTGTTCGTTAT |
| | | AAGGAGATGAATGCTTTTGATGGTAAGACTATTGATAAGGAGACTGGTGAGGTTCTTCATCAGAAGACTCATTTTCCTCAGCC |
| | | TTGGGAGTTTTTTGCTCAGGAGGTTATGATTCGTGTTTTTGGTAAGCCTGATGGTAAGCCTGAGTTTGAGGAGGCTGATACTC |
| | | CTGAGAAGCTTCGTACTCTTCTTGCTGAGAAGCTTTCTTCTCGTCCTGAGGCTGTTCATGAGTATGTTACTCCTCTTTTTGTT |
| | | TCTCGTGCTCCTAATCGTAAGATGTCTGGTCAGGGTCATATGGAGACTGTTAAGTCTGCTAAGCGTCTTGATGAGGGTGTTTC |
| | | TGTTCTTCGTGTTCCTCTTACTCAGCTTAAGCTTAAGGATCTTGAGAAGATGGTTAATCGTGAGCGTGAGCCTAAGCTTTATG |
| | | AGGCTCTTAAGGCTCGTCTTGAGGCTCATAAGGATGATCCTGCTAAGGCTTTTGCTGAGCCTTTTTATAAGTATGATAAGGCT |
| | | GGTAATCGTACTCAGCAGGTTAAGGCTGTTCGTGTTGAGCAGGTTCAGAAGACTGGTGTTTGGGTTCGTAATCATAATGGTAT |
| | | TGCTGATAATGCTACTATGGTTCGTGTTGATGTTTTTGAGAAGGGTGATAAGTATTATCTTGTTCCTATTTATTCTTGGCAGG |
| | | TTGCTAAGGGTATTCTTCCTGATCGTGCTGTTGTTGCTTATGCTGATGAGGAGGATTGGACTGTTATTGATGAGTCTTTTCGT |
| | | TTTAAGTTTGTTCTTTATTCTAATGATCTTATTAAGGTTCAGCTTAAGAAGGATTCTTTTCTTGGTTATTTTTCTGGTCTTGA |
| | | TCGTGCTACTGGTGCTATTTCTCTTCGTGAGCATGATCTTGAGAAGTCTAAGGGTAAGGATGGTATGCATCGTATTGGTGTTA |
| | | AGACTGCTCTTTCTTTTCAGAAGTATCAGATTGATGAGATGGGTAAGGAGATTCGTCCTTGTCGTCTTAAGAAGCGTCCTCCT |
| | | GTTCGTUAA |
| Exemplary | 295 | ATGGCCGCCTTCAAGCCCAACCCCATCAACTACATCCTGGGCCTGGCCATCGGCATCGCCTCCGTGGGCTGGGCCATGGTGGA |
| open | | GATCGACGAGGAGGAGAACCCCATCCGGCTGATCGACCTGGGCGTGCGGGTGTTCGAGCGGGCCGAGGTGCCCAAGACCGGCG |
| reading | | ACTCCCTGGCCATGGCCCGGCGGCTGGCCCGGTCCGTGCGGCGGCTGACCCGGCGGCGGGCCCACCGGCTGCTGCGGGCCCGG |
| frame for | | CGGCTGCTGAAGCGGGAGGGCGTGCTGCAGGCCGCCGACTTCGACGAGAACGGCCTGATCAAGTCCCTGCCCAACACCCCCTG |
| Nme3Cas9 | | GCAGCTGCGGGCCGCCGCCCTGGACCGGAAGCTGACCCCCCTGGAGTGGTCCGCCGTGCTGCTGCACCTGATCAAGCACCGGG |
| RuvC | | GCTACCTGTCCCAGCGGAAGAACGAGGGCGAGACCGCCGACAAGGAGCTGGGCGCCCTGCTGAAGGGCGTGGCCGACAACGCC |
| nickase | | CACGCCCTGCAGACCGGCGACTTCCGGACCCCCGCCGAGCTGGCCCTGAACAAGTTCGAGAAGGAGTGCGGCCACATCCGGAA |
| | | CCAGCGGGGCGACTACTCCCACACCTTCTCCCGGAAGGACCTGCAGGCCGAGCTGAACCTGCTGTTCGAGAAGCAGAAGGAGT |
| | | TCGGCAACCCCCACGTGTCCGGCGGCCTGAAGGAGGGCATCGAGACCCTGCTGATGACCCAGCGGCCCGCCCTGTCCGGCGAC |
| | | GCCGTGCAGAAGATGCTGGGCCACTGCACCTTCGAGCCCGCCGAGCCCAAGGCCGCCAAGAACACCTACACCGCCGAGCGGTT |
| | | CATCTGGCTGACCAAGCTGAACAACCTGCGGATCCTGGAGCAGGGCTCCGAGCGGCCCCTGACCGACACCGAGCGGGCCACCC |
| | | TGATGGACGAGCCCTACCGGAAGTCCAAGCTGACCTACGCCCAGGCCCGGAAGCTGCTGTCCCTGGAGGACACCGCCTTCTTC |
| | | AAGGGCCTGCGGTACGGCAAGGACAACGCCGAGGCCTCCACCCTGATGGAGATGAAGGCCTACCACACCATCTCCCGGGCCCT |
| | | GGAGAAGGAGGGCCTGAAGGACAAGAAGTCCCCCCTGAACCTGTCCCCCGAGCTGCAGGACGAGATCGGCACCGCCTTCTCCC |
| | | TGTTCAAGACCGACGAGGACATCACCGGCCGGCTGAAGGACCGGATCCAGCCCGAGATCCTGGAGGCCCTGCTGAAGCACATC |
| | | TCCTTCGACAAGTTCGTGCAGATCTCCCTGAAGGCCCTGCGGCGGATCGTGCCCCTGATGGAGCAGGGCAAGCGGTACGACGA |
| | | GGCCTGCGCCGAGATCTACGGCGACCACTACGGCAAGAAGAACACCGAGGAGAAGATCTACCTGCCCCCCATCCCCGCCGACG |
| | | AGATCCGGAACCCCGTGGTGCTGCGGGCCCTGTCCCAGGCCCGGAAGGTGATCAACGGCGTGGTGCGGCGGTACGGCTCCCCC |
| | | GCCCGGATCCACATCGAGACCGCCCGGGAGGTGGGCAAGTCCTTCAAGGACCGGAAGGAGATCGAGAAGCGGCAGGAGGAGAA |
| | | CCGGAAGGACCGGGAGAAGGCCGCCGCCAAGTTCCGGGAGTACTTCCCCAACTTCGTGGGCGAGCCCAAGTCCAAGGACATCC |
| | | TGAAGCTGCGGCTGTACGAGCAGCAGCACGGCAAGTGCCTGTACTCCGGCAAGGAGATCAACCTGGGCCGGCTGAACGAGAAG |
| | | GGCTACGTGGAGATCGACCACGCCCTGCCCTTCTCCCGGACCTGGGACGACTCCTTCAACAACAAGGTGCTGGTGCTGGGCTC |
| | | CGAGAACCAGAACAAGGGCAACCAGACCCCCTACGAGTACTTCAACGGCAAGGACAACTCCCGGGAGTGGCAGGAGTTCAAGG |
| | | CCCGGGTGGAGACCTCCCGGTTCCCCCGGTCCAAGAAGCAGCGGATCCTGCTGCAGAAGTTCGACGAGGACGGCTTCAAGGAG |
| | | CGGAACCTGAACGACACCCGGTACGTGAACCGGTTCCTGTGCCAGTTCGTGGCCGACCGGATGCGGCTGACCGGCAAGGGCAA |
| | | GAAGCGGGTGTTCGCCTCCAACGGCCAGATCACCAACCTGCTGCGGGGCTTCTGGGGCCTGCGGAAGGTGCGGGCCGAGAACG |
| | | ACCGGCACCACGCCCTGGACGCCGTGGTGGTGGCCTGCTCCACCGTGGCCATGCAGCAGAAGATCACCCGGTTCGTGCGGTAC |
| | | AAGGAGATGAACGCCTTCGACGGCAAGACCATCGACAAGGAGACCGGCGAGGTGCTGCACCAGAAGACCCACTTCCCCCAGCC |
| | | CTGGGAGTTCTTCGCCCAGGAGGTGATGATCCGGGTGTTCGGCAAGCCCGACGGCAAGCCCGAGTTCGAGGAGGCCGACACCC |
| | | CCGAGAAGCTGCGGACCCTGCTGGCCGAGAAGCTGTCCTCCCGGCCCGAGGCCGTGCACGAGTACGTGACCCCCCTGTTCGTG |
| | | TCCCGGGCCCCCAACCGGAAGATGTCCGGCCAGGGCCACATGGAGACCGTGAAGTCCGCCAAGCGGCTGGACGAGGGCGTGTC |
| | | CGTGCTGCGGGTGCCCCTGACCCAGCTGAAGCTGAAGGACCTGGAGAAGATGGTGAACCGGGAGCGGGAGCCCAAGCTGTACG |
| | | AGGCCCTGAAGGCCCGGCTGGAGGCCCACAAGGACGACCCCGCCAAGGCCTTCGCCGAGCCCTTCTACAAGTACGACAAGGCC |
| | | GGCAACCGGACCCAGCAGGTGAAGGCCGTGCGGGTGGAGCAGGTGCAGAAGACCGGCGTGTGGGTGCGGAACCACAACGGCAT |
| | | CGCCGACAACGCCACCATGGTGCGGGTGGACGTGTTCGAGAAGGGCGACAAGTACTACCTGGTGCCCATCTACTCCTGGCAGG |
| | | TGGCCAAGGGCATCCTGCCCGACCGGGCCGTGGTGGCCTACGCCGACGAGGAGGACTGGACCGTGATCGACGAGTCCTTCCGG |
| | | TTCAAGTTCGTGCTGTACTCCAACGACCTGATCAAGGTGCAGCTGAAGAAGGACTCCTTCCTGGGCTACTTCTCCGGCCTGGA |
| | | CCGGGCCACCGGCGCCATCTCCCTGCGGGAGCACGACCTGGAGAAGTCCAAGGGCAAGGACGGCATGCACCGGATCGGCGTGA |
| | | AGACCGCCCTGTCCTTCCAGAAGTACCAGATCGACGAGATGGGCAAGGAGATCCGGCCCTGCCGGCTGAAGAAGCGGCCCCCC |
| | | GTGCGGUGA |
| Exemplary | 296 | ATGGCAGCATTCAAACCAAACCCAATCAACTACATCCTAGGACTAGCAATCGGAATCGCATCAGTAGGATGAGCAATGGTAGA |
| open | | AATCGACGAAGAAGAAAACCCAATCCGACTAATCGACCTAGGAGTACGAGTATTCGAACGAGCAGAAGTACCAAAAACAGGAG |
| reading | | ACTCACTAGCAATGGCACGACGACTAGCACGATCAGTACGACGACTAACACGACGACGAGCACACCGACTACTACGAGCACGA |
| frame for | | CGACTACTAAAACGAGAAGGAGTACTACAAGCAGCAGACTTCGACGAAAACGGACTAATCAAATCACTACCAAACACACCATG |
| Nme3Cas9 | | ACAACTACGAGCAGCAGCACTAGACCGAAAACTAACACCACTAGAATGATCAGCAGTACTACTACACCTAATCAAACACCGAG |
| Ruvc | | GATACCTATCACAACGAAAAAACGAAGGAGAAACAGCAGACAAAGAACTAGGAGCACTACTAAAAGGAGTAGCAGACAACGCA |
| nickase | | CACGCACTACAAACAGGAGACTTCCGAACACCAGCAGAACTAGCACTAAACAAATTCGAAAAAGAATGCGGACACATCCGAAA |
| | | CCAACGAGGAGACTACTCACACACATTCTCACGAAAAGACCTACAAGCAGAACTAAACCTACTATTCGAAAAACAAAAAGAAT |
| | | TCGGAAACCCACACGTATCAGGAGGACTAAAAGAAGGAATCGAAACACTACTAATGACACAACGACCAGCACTATCAGGAGAC |
| | | GCAGTACAAAAAATGCTAGGACACTGCACATTCGAACCAGCAGAACCAAAAGCAGCAAAAAACACATACACAGCAGAACGATT |
| | | CATCTGACTAACAAAACTAAACAACCTACGAATCCTAGAACAAGGATCAGAACGACCACTAACAGACACAGAACGAGCAACAC |
| | | TAATGGACGAACCATACCGAAAATCAAAACTAACATACGCACAAGCACGAAAACTACTATCACTAGAAGACACAGCATTCTTC |
| | | AAAGGACTACGATACGGAAAAGACAACGCAGAAGCATCAACACTAATGGAAATGAAAGCATACCACACAATCTCACGAGCACT |
| | | AGAAAAAGAAGGACTAAAAGACAAAAAATCACCACTAAACCTATCACCAGAACTACAAGACGAAATCGGAACAGCATTCTCAC |
| | | TATTCAAAACAGACGAAGACATCACAGGACGACTAAAAGACCGAATCCAACCAGAAATCCTAGAAGCACTACTAAAACACATC |
| | | TCATTCGACAAATTCGTACAAATCTCACTAAAAGCACTACGACGAATCGTACCACTAATGGAACAAGGAAAACGATACGACGA |
| | | AGCATGCGCAGAAATCTACGGAGACCACTACGGAAAAAAAAACACAGAAGAAAAAATCTACCTACCACCAATCCCAGCAGACG |
| | | AAATCCGAAACCCAGTAGTACTACGAGCACTATCACAAGCACGAAAAGTAATCAACGGAGTAGTACGACGATACGGATCACCA |
| | | GCACGAATCCACATCGAAACAGCACGAGAAGTAGGAAAATCATTCAAAGACCGAAAAGAAATCGAAAAACGACAAGAAGAAAA |
| | | CCGAAAAGACCGAGAAAAAGCAGCAGCAAAATTCCGAGAATACTTCCCAAACTTCGTAGGAGAACCAAAATCAAAAGACATCC |
| | | TAAAACTACGACTATACGAACAACAACACGGAAAATGCCTATACTCAGGAAAAGAAATCAACCTAGGACGACTAAACGAAAAA |
| | | GGATACGTAGAAATCGACCACGCACTACCATTCTCACGAACATGAGACGACTCATTCAACAACAAAGTACTAGTACTAGGATC |
| | | AGAAAACCAAAACAAAGGAAACCAAACACCATACGAATACTTCAACGGAAAAGACAACTCACGAGAATGACAAGAATTCAAAG |
| | | CACGAGTAGAAACATCACGATTCCCACGATCAAAAAAACAACGAATCCTACTACAAAAATTCGACGAAGACGGATTCAAAGAA |
| | | CGAAACCTAAACGACACACGATACGTAAACCGATTCCTATGCCAATTCGTAGCAGACCGAATGCGACTAACAGGAAAAGGAAA |
| | | AAAACGAGTATTCGCATCAAACGGACAAATCACAAACCTACTACGAGGATTCTGAGGACTACGAAAAGTACGAGCAGAAAACG |
| | | ACCGACACCACGCACTAGACGCAGTAGTAGTAGCATGCTCAACAGTAGCAATGCAACAAAAAATCACACGATTCGTACGATAC |
| | | AAAGAAATGAACGCATTCGACGGAAAAACAATCGACAAAGAAACAGGAGAAGTACTACACCAAAAAACACACTTCCCACAACC |
| | | ATGAGAATTCTTCGCACAAGAAGTAATGATCCGAGTATTCGGAAAACCAGACGGAAAACCAGAATTCGAAGAAGCAGACACAC |
| | | CAGAAAAACTACGAACACTACTAGCAGAAAAACTATCATCACGACCAGAAGCAGTACACGAATACGTAACACCACTATTCGTA |
| | | TCACGAGCACCAAACCGAAAAATGTCAGGACAAGGACACATGGAAACAGTAAAATCAGCAAAACGACTAGACGAAGGAGTATC |
| | | AGTACTACGAGTACCACTAACACAACTAAAACTAAAAGACCTAGAAAAAATGGTAAACCGAGAACGAGAACCAAAACTATACG |
| | | AAGCACTAAAAGCACGACTAGAAGCACACAAAGACGACCCAGCAAAAGCATTCGCAGAACCATTCTACAAATACGACAAAGCA |
| | | GGAAACCGAACACAACAAGTAAAAGCAGTACGAGTAGAACAAGTACAAAAAACAGGAGTATGAGTACGAAACCACAACGGAAT |
| | | CGCAGACAACGCAACAATGGTACGAGTAGACGTATTCGAAAAAGGAGACAAATACTACCTAGTACCAATCTACTCATGACAAG |
| | | TAGCAAAAGGAATCCTACCAGACCGAGCAGTAGTAGCATACGCAGACGAAGAAGACTGAACAGTAATCGACGAATCATTCCGA |
| | | TTCAAATTCGTACTATACTCAAACGACCTAATCAAAGTACAACTAAAAAAAGACTCATTCCTAGGATACTTCTCAGGACTAGA |
| | | CCGAGCAACAGGAGCAATCTCACTACGAGAACACGACCTAGAAAAATCAAAAGGAAAAGACGGAATGCACCGAATCGGAGTAA |
| | | AAACAGCACTATCATTCCAAAAATACCAAATCGACGAAATGGGAAAAGAAATCCGACCATGCCGACTAAAAAAACGACCACCA |
| | | GTACGAUAA |
| Exemplary | 297 | MAAFKPNPINYILGLDIGIASVGWAMVEIDEEENPIRLIDLGVRVFERAEVPKTGDSLAMARRLARSVRRLTRRRAHRLLRAR |
| amino | | RLLKREGVLQAADEDENGLIKSLPNTPWQLRAAALDRKLTPLEWSAVLLHLIKHRGYLSQRKNEGETADKELGALLKGVADNA |
| acid | | HALQTGDFRTPAELALNKFEKECGHIRNQRGDYSHTFSRKDLQAELNLLFEKQKEFGNPHVSGGLKEGIETLLMTQRPALSGD |
| sequence | | AVQKMLGHCTFEPAEPKAAKNTYTAERFIWLTKLNNLRILEQGSERPLTDTERATLMDEPYRKSKLTYAQARKLLSLEDTAFF |
| of | | KGLRYGKDNAEASTLMEMKAYHTISRALEKEGLKDKKSPLNLSPELQDEIGTAFSLFKTDEDITGRLKDRIQPEILEALLKHI |
| Nme3Cas9 | | SFDKFVQISLKALRRIVPLMEQGKRYDEACAEIYGDHYGKKNTEEKIYLPPIPADEIRNPVVLRALSQARKVINGVVRRYGSP |
| HNH | | ARIHIETAREVGKSFKDRKEIEKRQEENRKDREKAAAKFREYFPNFVGEPKSKDILKLRLYEQQHGKCLYSGKEINLGRLNEK |
| nickase | | GYVEIDAALPESRTWDDSFNNKVLVLGSENQNKGNQTPYEYENGKDNSREWQEFKARVETSREPRSKKQRILLQKFDEDGEKE |
| | | RNLNDTRYVNRFLCQFVADRMRLTGKGKKRVFASNGQITNLLRGFWGLRKVRAENDRHHALDAVVVACSTVAMQQKITREVRY |
| | | KEMNAFDGKTIDKETGEVLHQKTHEPQPWEFFAQEVMIRVFGKPDGKPEFEEADTPEKLRTLLAEKLSSRPEAVHEYVTPLFV |
| | | SRAPNRKMSGQGHMETVKSAKRLDEGVSVLRVPLTQLKLKDLEKMVNREREPKLYEALKARLEAHKDDPAKAFAEPFYKYDKA |
| | | GNRTQQVKAVRVEQVQKTGVWVRNHNGIADNATMVRVDVFEKGDKYYLVPIYSWQVAKGILPDRAVVAYADEEDWTVIDESFR |
| | | FKFVLYSNDLIKVQLKKDSFLGYFSGLDRATGAISLREHDLEKSKGKDGMHRIGVKTALSFQKYQIDEMGKEIRPCRLKKRPP |
| | | VR |
| Exemplary | 298 | GCTGCTTTTAAGCCTAATCCTATTAATTATATTCTTGGTCTTGATATTGGTATTGCTTCTGTTGGTTGGGCTATGGTTGAGAT |
| coding | | TGATGAGGAGGAGAATCCTATTCGTCTTATTGATCTTGGTGTTCGTGTTTTTGAGCGTGCTGAGGTTCCTAAGACTGGTGATT |
| sequence | | CTCTTGCTATGGCTCGTCGTCTTGCTCGTTCTGTTCGTCGTCTTACTCGTCGTCGTGCTCATCGTCTTCTTCGTGCTCGTCGT |
| encoding | | CTTCTTAAGCGTGAGGGTGTTCTTCAGGCTGCTGATTTTGATGAGAATGGTCTTATTAAGTCTCTTCCTAATACTCCTTGGCA |
| Nme3Cas9 | | GCTTCGTGCTGCTGCTCTTGATCGTAAGCTTACTCCTCTTGAGTGGTCTGCTGTTCTTCTTCATCTTATTAAGCATCGTGGTT |
| HNH | | ATCTTTCTCAGCGTAAGAATGAGGGTGAGACTGCTGATAAGGAGCTTGGTGCTCTTCTTAAGGGTGTTGCTGATAATGCTCAT |
| nickase | | GCTCTTCAGACTGGTGATTTTCGTACTCCTGCTGAGCTTGCTCTTAATAAGTTTGAGAAGGAGTGTGGTCATATTCGTAATCA |
| | | GCGTGGTGATTATTCTCATACTTTTTCTCGTAAGGATCTTCAGGCTGAGCTTAATCTTCTTTTTGAGAAGCAGAAGGAGTTTG |
| | | GTAATCCTCATGTTTCTGGTGGTCTTAAGGAGGGTATTGAGACTCTTCTTATGACTCAGCGTCCTGCTCTTTCTGGTGATGCT |
| | | GTTCAGAAGATGCTTGGTCATTGTACTTTTGAGCCTGCTGAGCCTAAGGCTGCTAAGAATACTTATACTGCTGAGCGTTTTAT |
| | | TTGGCTTACTAAGCTTAATAATCTTCGTATTCTTGAGCAGGGTTCTGAGCGTCCTCTTACTGATACTGAGCGTGCTACTCTTA |
| | | TGGATGAGCCTTATCGTAAGTCTAAGCTTACTTATGCTCAGGCTCGTAAGCTTCTTTCTCTTGAGGATACTGCTTTTTTTAAG |
| | | GGTCTTCGTTATGGTAAGGATAATGCTGAGGCTTCTACTCTTATGGAGATGAAGGCTTATCATACTATTTCTCGTGCTCTTGA |
| | | GAAGGAGGGTCTTAAGGATAAGAAGTCTCCTCTTAATCTTTCTCCTGAGCTTCAGGATGAGATTGGTACTGCTTTTTCTCTTT |
| | | TTAAGACTGATGAGGATATTACTGGTCGTCTTAAGGATCGTATTCAGCCTGAGATTCTTGAGGCTCTTCTTAAGCATATTTCT |
| | | TTTGATAAGTTTGTTCAGATTTCTCTTAAGGCTCTTCGTCGTATTGTTCCTCTTATGGAGCAGGGTAAGCGTTATGATGAGGC |
| | | TTGTGCTGAGATTTATGGTGATCATTATGGTAAGAAGAATACTGAGGAGAAGATTTATCTTCCTCCTATTCCTGCTGATGAGA |
| | | TTCGTAATCCTGTTGTTCTTCGTGCTCTTTCTCAGGCTCGTAAGGTTATTAATGGTGTTGTTCGTCGTTATGGTTCTCCTGCT |
| | | CGTATTCATATTGAGACTGCTCGTGAGGTTGGTAAGTCTTTTAAGGATCGTAAGGAGATTGAGAAGCGTCAGGAGGAGAATCG |
| | | TAAGGATCGTGAGAAGGCTGCTGCTAAGTTTCGTGAGTATTTTCCTAATTTTGTTGGTGAGCCTAAGTCTAAGGATATTCTTA |
| | | AGCTTCGTCTTTATGAGCAGCAGCATGGTAAGTGTCTTTATTCTGGTAAGGAGATTAATCTTGGTCGTCTTAATGAGAAGGGT |
| | | TATGTTGAGATTGATGCTGCTCTTCCTTTTTCTCGTACTTGGGATGATTCTTTTAATAATAAGGTTCTTGTTCTTGGTTCTGA |
| | | GAATCAGAATAAGGGTAATCAGACTCCTTATGAGTATTTTAATGGTAAGGATAATTCTCGTGAGTGGCAGGAGTTTAAGGCTC |
| | | GTGTTGAGACTTCTCGTTTTCCTCGTTCTAAGAAGCAGCGTATTCTTCTTCAGAAGTTTGATGAGGATGGTTTTAAGGAGCGT |
| | | AATCTTAATGATACTCGTTATGTTAATCGTTTTCTTTGTCAGTTTGTTGCTGATCGTATGCGTCTTACTGGTAAGGGTAAGAA |
| | | GCGTGTTTTTGCTTCTAATGGTCAGATTACTAATCTTCTTCGTGGTTTTTGGGGTCTTCGTAAGGTTCGTGCTGAGAATGATC |
| | | GTCATCATGCTCTTGATGCTGTTGTTGTTGCTTGTTCTACTGTTGCTATGCAGCAGAAGATTACTCGTTTTGTTCGTTATAAG |
| | | GAGATGAATGCTTTTGATGGTAAGACTATTGATAAGGAGACTGGTGAGGTTCTTCATCAGAAGACTCATTTTCCTCAGCCTTG |
| | | GGAGTTTTTTGCTCAGGAGGTTATGATTCGTGTTTTTGGTAAGCCTGATGGTAAGCCTGAGTTTGAGGAGGCTGATACTCCTG |
| | | AGAAGCTTCGTACTCTTCTTGCTGAGAAGCTTTCTTCTCGTCCTGAGGCTGTTCATGAGTATGTTACTCCTCTTTTTGTTTCT |
| | | CGTGCTCCTAATCGTAAGATGTCTGGTCAGGGTCATATGGAGACTGTTAAGTCTGCTAAGCGTCTTGATGAGGGTGTTTCTGT |
| | | TCTTCGTGTTCCTCTTACTCAGCTTAAGCTTAAGGATCTTGAGAAGATGGTTAATCGTGAGCGTGAGCCTAAGCTTTATGAGG |
| | | CTCTTAAGGCTCGTCTTGAGGCTCATAAGGATGATCCTGCTAAGGCTTTTGCTGAGCCTTTTTATAAGTATGATAAGGCTGGT |
| | | AATCGTACTCAGCAGGTTAAGGCTGTTCGTGTTGAGCAGGTTCAGAAGACTGGTGTTTGGGTTCGTAATCATAATGGTATTGC |
| | | TGATAATGCTACTATGGTTCGTGTTGATGTTTTTGAGAAGGGTGATAAGTATTATCTTGTTCCTATTTATTCTTGGCAGGTTG |
| | | CTAAGGGTATTCTTCCTGATCGTGCTGTTGTTGCTTATGCTGATGAGGAGGATTGGACTGTTATTGATGAGTCTTTTCGTTTT |
| | | AAGTTTGTTCTTTATTCTAATGATCTTATTAAGGTTCAGCTTAAGAAGGATTCTTTTCTTGGTTATTTTTCTGGTCTTGATCG |
| | | TGCTACTGGTGCTATTTCTCTTCGTGAGCATGATCTTGAGAAGTCTAAGGGTAAGGATGGTATGCATCGTATTGGTGTTAAGA |
| | | CTGCTCTTTCTTTTCAGAAGTATCAGATTGATGAGATGGGTAAGGAGATTCGTCCTTGTCGTCTTAAGAAGCGTCCTCCTGTT |
| | | CGT |
| Exemplary | 299 | GCCGCCTTCAAGCCCAACCCCATCAACTACATCCTGGGCCTGGACATCGGCATCGCCTCCGTGGGCTGGGCCATGGTGGAGAT |
| coding | | CGACGAGGAGGAGAACCCCATCCGGCTGATCGACCTGGGCGTGCGGGTGTTCGAGCGGGCCGAGGTGCCCAAGACCGGCGACT |
| sequence | | CCCTGGCCATGGCCCGGCGGCTGGCCCGGTCCGTGCGGCGGCTGACCCGGCGGCGGGCCCACCGGCTGCTGCGGGCCCGGCGG |
| encoding | | CTGCTGAAGCGGGAGGGCGTGCTGCAGGCCGCCGACTTCGACGAGAACGGCCTGATCAAGTCCCTGCCCAACACCCCCTGGCA |
| Nme3Cas9 | | GCTGCGGGCCGCCGCCCTGGACCGGAAGCTGACCCCCCTGGAGTGGTCCGCCGTGCTGCTGCACCTGATCAAGCACCGGGGCT |
| HNH | | ACCTGTCCCAGCGGAAGAACGAGGGCGAGACCGCCGACAAGGAGCTGGGCGCCCTGCTGAAGGGCGTGGCCGACAACGCCCAC |
| nickase | | GCCCTGCAGACCGGCGACTTCCGGACCCCCGCCGAGCTGGCCCTGAACAAGTTCGAGAAGGAGTGCGGCCACATCCGGAACCA |
| | | GCGGGGCGACTACTCCCACACCTTCTCCCGGAAGGACCTGCAGGCCGAGCTGAACCTGCTGTTCGAGAAGCAGAAGGAGTTCG |
| | | GCAACCCCCACGTGTCCGGCGGCCTGAAGGAGGGCATCGAGACCCTGCTGATGACCCAGCGGCCCGCCCTGTCCGGCGACGCC |
| | | GTGCAGAAGATGCTGGGCCACTGCACCTTCGAGCCCGCCGAGCCCAAGGCCGCCAAGAACACCTACACCGCCGAGCGGTTCAT |
| | | CTGGCTGACCAAGCTGAACAACCTGCGGATCCTGGAGCAGGGCTCCGAGCGGCCCCTGACCGACACCGAGCGGGCCACCCTGA |
| | | TGGACGAGCCCTACCGGAAGTCCAAGCTGACCTACGCCCAGGCCCGGAAGCTGCTGTCCCTGGAGGACACCGCCTTCTTCAAG |
| | | GGCCTGCGGTACGGCAAGGACAACGCCGAGGCCTCCACCCTGATGGAGATGAAGGCCTACCACACCATCTCCCGGGCCCTGGA |
| | | GAAGGAGGGCCTGAAGGACAAGAAGTCCCCCCTGAACCTGTCCCCCGAGCTGCAGGACGAGATCGGCACCGCCTTCTCCCTGT |
| | | TCAAGACCGACGAGGACATCACCGGCCGGCTGAAGGACCGGATCCAGCCCGAGATCCTGGAGGCCCTGCTGAAGCACATCTCC |
| | | TTCGACAAGTTCGTGCAGATCTCCCTGAAGGCCCTGCGGCGGATCGTGCCCCTGATGGAGCAGGGCAAGCGGTACGACGAGGC |
| | | CTGCGCCGAGATCTACGGCGACCACTACGGCAAGAAGAACACCGAGGAGAAGATCTACCTGCCCCCCATCCCCGCCGACGAGA |
| | | TCCGGAACCCCGTGGTGCTGCGGGCCCTGTCCCAGGCCCGGAAGGTGATCAACGGCGTGGTGCGGCGGTACGGCTCCCCCGCC |
| | | CGGATCCACATCGAGACCGCCCGGGAGGTGGGCAAGTCCTTCAAGGACCGGAAGGAGATCGAGAAGCGGCAGGAGGAGAACCG |
| | | GAAGGACCGGGAGAAGGCCGCCGCCAAGTTCCGGGAGTACTTCCCCAACTTCGTGGGCGAGCCCAAGTCCAAGGACATCCTGA |
| | | AGCTGCGGCTGTACGAGCAGCAGCACGGCAAGTGCCTGTACTCCGGCAAGGAGATCAACCTGGGCCGGCTGAACGAGAAGGGC |
| | | TACGTGGAGATCGACGCCGCCCTGCCCTTCTCCCGGACCTGGGACGACTCCTTCAACAACAAGGTGCTGGTGCTGGGCTCCGA |
| | | GAACCAGAACAAGGGCAACCAGACCCCCTACGAGTACTTCAACGGCAAGGACAACTCCCGGGAGTGGCAGGAGTTCAAGGCCC |
| | | GGGTGGAGACCTCCCGGTTCCCCCGGTCCAAGAAGCAGCGGATCCTGCTGCAGAAGTTCGACGAGGACGGCTTCAAGGAGCGG |
| | | AACCTGAACGACACCCGGTACGTGAACCGGTTCCTGTGCCAGTTCGTGGCCGACCGGATGCGGCTGACCGGCAAGGGCAAGAA |
| | | GCGGGTGTTCGCCTCCAACGGCCAGATCACCAACCTGCTGCGGGGCTTCTGGGGCCTGCGGAAGGTGCGGGCCGAGAACGACC |
| | | GGCACCACGCCCTGGACGCCGTGGTGGTGGCCTGCTCCACCGTGGCCATGCAGCAGAAGATCACCCGGTTCGTGCGGTACAAG |
| | | GAGATGAACGCCTTCGACGGCAAGACCATCGACAAGGAGACCGGCGAGGTGCTGCACCAGAAGACCCACTTCCCCCAGCCCTG |
| | | GGAGTTCTTCGCCCAGGAGGTGATGATCCGGGTGTTCGGCAAGCCCGACGGCAAGCCCGAGTTCGAGGAGGCCGACACCCCCG |
| | | AGAAGCTGCGGACCCTGCTGGCCGAGAAGCTGTCCTCCCGGCCCGAGGCCGTGCACGAGTACGTGACCCCCCTGTTCGTGTCC |
| | | CGGGCCCCCAACCGGAAGATGTCCGGCCAGGGCCACATGGAGACCGTGAAGTCCGCCAAGCGGCTGGACGAGGGCGTGTCCGT |
| | | GCTGCGGGTGCCCCTGACCCAGCTGAAGCTGAAGGACCTGGAGAAGATGGTGAACCGGGAGCGGGAGCCCAAGCTGTACGAGG |
| | | CCCTGAAGGCCCGGCTGGAGGCCCACAAGGACGACCCCGCCAAGGCCTTCGCCGAGCCCTTCTACAAGTACGACAAGGCCGGC |
| | | AACCGGACCCAGCAGGTGAAGGCCGTGCGGGTGGAGCAGGTGCAGAAGACCGGCGTGTGGGTGCGGAACCACAACGGCATCGC |
| | | CGACAACGCCACCATGGTGCGGGTGGACGTGTTCGAGAAGGGCGACAAGTACTACCTGGTGCCCATCTACTCCTGGCAGGTGG |
| | | CCAAGGGCATCCTGCCCGACCGGGCCGTGGTGGCCTACGCCGACGAGGAGGACTGGACCGTGATCGACGAGTCCTTCCGGTTC |
| | | AAGTTCGTGCTGTACTCCAACGACCTGATCAAGGTGCAGCTGAAGAAGGACTCCTTCCTGGGCTACTTCTCCGGCCTGGACCG |
| | | GGCCACCGGCGCCATCTCCCTGCGGGAGCACGACCTGGAGAAGTCCAAGGGCAAGGACGGCATGCACCGGATCGGCGTGAAGA |
| | | CCGCCCTGTCCTTCCAGAAGTACCAGATCGACGAGATGGGCAAGGAGATCCGGCCCTGCCGGCTGAAGAAGCGGCCCCCCGTG |
| | | CGG |
| Exemplary | 300 | GCAGCATTCAAACCAAACCCAATCAACTACATCCTAGGACTAGACATCGGAATCGCATCAGTAGGATGAGCAATGGTAGAAAT |
| coding | | CGACGAAGAAGAAAACCCAATCCGACTAATCGACCTAGGAGTACGAGTATTCGAACGAGCAGAAGTACCAAAAACAGGAGACT |
| sequence | | CACTAGCAATGGCACGACGACTAGCACGATCAGTACGACGACTAACACGACGACGAGCACACCGACTACTACGAGCACGACGA |
| encoding | | CTACTAAAACGAGAAGGAGTACTACAAGCAGCAGACTTCGACGAAAACGGACTAATCAAATCACTACCAAACACACCATGACA |
| Nme3Cas9 | | ACTACGAGCAGCAGCACTAGACCGAAAACTAACACCACTAGAATGATCAGCAGTACTACTACACCTAATCAAACACCGAGGAT |
| HNH | | ACCTATCACAACGAAAAAACGAAGGAGAAACAGCAGACAAAGAACTAGGAGCACTACTAAAAGGAGTAGCAGACAACGCACAC |
| nickase | | GCACTACAAACAGGAGACTTCCGAACACCAGCAGAACTAGCACTAAACAAATTCGAAAAAGAATGCGGACACATCCGAAACCA |
| | | ACGAGGAGACTACTCACACACATTCTCACGAAAAGACCTACAAGCAGAACTAAACCTACTATTCGAAAAACAAAAAGAATTCG |
| | | GAAACCCACACGTATCAGGAGGACTAAAAGAAGGAATCGAAACACTACTAATGACACAACGACCAGCACTATCAGGAGACGCA |
| | | GTACAAAAAATGCTAGGACACTGCACATTCGAACCAGCAGAACCAAAAGCAGCAAAAAACACATACACAGCAGAACGATTCAT |
| | | CTGACTAACAAAACTAAACAACCTACGAATCCTAGAACAAGGATCAGAACGACCACTAACAGACACAGAACGAGCAACACTAA |
| | | TGGACGAACCATACCGAAAATCAAAACTAACATACGCACAAGCACGAAAACTACTATCACTAGAAGACACAGCATTCTTCAAA |
| | | GGACTACGATACGGAAAAGACAACGCAGAAGCATCAACACTAATGGAAATGAAAGCATACCACACAATCTCACGAGCACTAGA |
| | | AAAAGAAGGACTAAAAGACAAAAAATCACCACTAAACCTATCACCAGAACTACAAGACGAAATCGGAACAGCATTCTCACTAT |
| | | TCAAAACAGACGAAGACATCACAGGACGACTAAAAGACCGAATCCAACCAGAAATCCTAGAAGCACTACTAAAACACATCTCA |
| | | TTCGACAAATTCGTACAAATCTCACTAAAAGCACTACGACGAATCGTACCACTAATGGAACAAGGAAAACGATACGACGAAGC |
| | | ATGCGCAGAAATCTACGGAGACCACTACGGAAAAAAAAACACAGAAGAAAAAATCTACCTACCACCAATCCCAGCAGACGAAA |
| | | TCCGAAACCCAGTAGTACTACGAGCACTATCACAAGCACGAAAAGTAATCAACGGAGTAGTACGACGATACGGATCACCAGCA |
| | | CGAATCCACATCGAAACAGCACGAGAAGTAGGAAAATCATTCAAAGACCGAAAAGAAATCGAAAAACGACAAGAAGAAAACCG |
| | | AAAAGACCGAGAAAAAGCAGCAGCAAAATTCCGAGAATACTTCCCAAACTTCGTAGGAGAACCAAAATCAAAAGACATCCTAA |
| | | AACTACGACTATACGAACAACAACACGGAAAATGCCTATACTCAGGAAAAGAAATCAACCTAGGACGACTAAACGAAAAAGGA |
| | | TACGTAGAAATCGACGCAGCACTACCATTCTCACGAACATGAGACGACTCATTCAACAACAAAGTACTAGTACTAGGATCAGA |
| | | AAACCAAAACAAAGGAAACCAAACACCATACGAATACTTCAACGGAAAAGACAACTCACGAGAATGACAAGAATTCAAAGCAC |
| | | GAGTAGAAACATCACGATTCCCACGATCAAAAAAACAACGAATCCTACTACAAAAATTCGACGAAGACGGATTCAAAGAACGA |
| | | AACCTAAACGACACACGATACGTAAACCGATTCCTATGCCAATTCGTAGCAGACCGAATGCGACTAACAGGAAAAGGAAAAAA |
| | | ACGAGTATTCGCATCAAACGGACAAATCACAAACCTACTACGAGGATTCTGAGGACTACGAAAAGTACGAGCAGAAAACGACC |
| | | GACACCACGCACTAGACGCAGTAGTAGTAGCATGCTCAACAGTAGCAATGCAACAAAAAATCACACGATTCGTACGATACAAA |
| | | GAAATGAACGCATTCGACGGAAAAACAATCGACAAAGAAACAGGAGAAGTACTACACCAAAAAACACACTTCCCACAACCATG |
| | | AGAATTCTTCGCACAAGAAGTAATGATCCGAGTATTCGGAAAACCAGACGGAAAACCAGAATTCGAAGAAGCAGACACACCAG |
| | | AAAAACTACGAACACTACTAGCAGAAAAACTATCATCACGACCAGAAGCAGTACACGAATACGTAACACCACTATTCGTATCA |
| | | CGAGCACCAAACCGAAAAATGTCAGGACAAGGACACATGGAAACAGTAAAATCAGCAAAACGACTAGACGAAGGAGTATCAGT |
| | | ACTACGAGTACCACTAACACAACTAAAACTAAAAGACCTAGAAAAAATGGTAAACCGAGAACGAGAACCAAAACTATACGAAG |
| | | CACTAAAAGCACGACTAGAAGCACACAAAGACGACCCAGCAAAAGCATTCGCAGAACCATTCTACAAATACGACAAAGCAGGA |
| | | AACCGAACACAACAAGTAAAAGCAGTACGAGTAGAACAAGTACAAAAAACAGGAGTATGAGTACGAAACCACAACGGAATCGC |
| | | AGACAACGCAACAATGGTACGAGTAGACGTATTCGAAAAAGGAGACAAATACTACCTAGTACCAATCTACTCATGACAAGTAG |
| | | CAAAAGGAATCCTACCAGACCGAGCAGTAGTAGCATACGCAGACGAAGAAGACTGAACAGTAATCGACGAATCATTCCGATTC |
| | | AAATTCGTACTATACTCAAACGACCTAATCAAAGTACAACTAAAAAAAGACTCATTCCTAGGATACTTCTCAGGACTAGACCG |
| | | AGCAACAGGAGCAATCTCACTACGAGAACACGACCTAGAAAAATCAAAAGGAAAAGACGGAATGCACCGAATCGGAGTAAAAA |
| | | CAGCACTATCATTCCAAAAATACCAAATCGACGAAATGGGAAAAGAAATCCGACCATGCCGACTAAAAAAACGACCACCAGTA |
| | | CGA |
| Exemplary | 301 | ATGGCTGCTTTTAAGCCTAATCCTATTAATTATATTCTTGGTCTTGATATTGGTATTGCTTCTGTTGGTTGGGCTATGGTTGA |
| open | | GATTGATGAGGAGGAGAATCCTATTCGTCTTATTGATCTTGGTGTTCGTGTTTTTGAGCGTGCTGAGGTTCCTAAGACTGGTG |
| reading | | ATTCTCTTGCTATGGCTCGTCGTCTTGCTCGTTCTGTTCGTCGTCTTACTCGTCGTCGTGCTCATCGTCTTCTTCGTGCTCGT |
| frame for | | CGTCTTCTTAAGCGTGAGGGTGTTCTTCAGGCTGCTGATTTTGATGAGAATGGTCTTATTAAGTCTCTTCCTAATACTCCTTG |
| Nme3Cas9 | | GCAGCTTCGTGCTGCTGCTCTTGATCGTAAGCTTACTCCTCTTGAGTGGTCTGCTGTTCTTCTTCATCTTATTAAGCATCGTG |
| HNH | | GTTATCTTTCTCAGCGTAAGAATGAGGGTGAGACTGCTGATAAGGAGCTTGGTGCTCTTCTTAAGGGTGTTGCTGATAATGCT |
| nickase | | CATGCTCTTCAGACTGGTGATTTTCGTACTCCTGCTGAGCTTGCTCTTAATAAGTTTGAGAAGGAGTGTGGTCATATTCGTAA |
| | | TCAGCGTGGTGATTATTCTCATACTTTTTCTCGTAAGGATCTTCAGGCTGAGCTTAATCTTCTTTTTGAGAAGCAGAAGGAGT |
| | | TTGGTAATCCTCATGTTTCTGGTGGTCTTAAGGAGGGTATTGAGACTCTTCTTATGACTCAGCGTCCTGCTCTTTCTGGTGAT |
| | | GCTGTTCAGAAGATGCTTGGTCATTGTACTTTTGAGCCTGCTGAGCCTAAGGCTGCTAAGAATACTTATACTGCTGAGCGTTT |
| | | TATTTGGCTTACTAAGCTTAATAATCTTCGTATTCTTGAGCAGGGTTCTGAGCGTCCTCTTACTGATACTGAGCGTGCTACTC |
| | | TTATGGATGAGCCTTATCGTAAGTCTAAGCTTACTTATGCTCAGGCTCGTAAGCTTCTTTCTCTTGAGGATACTGCTTTTTTT |
| | | AAGGGTCTTCGTTATGGTAAGGATAATGCTGAGGCTTCTACTCTTATGGAGATGAAGGCTTATCATACTATTTCTCGTGCTCT |
| | | TGAGAAGGAGGGTCTTAAGGATAAGAAGTCTCCTCTTAATCTTTCTCCTGAGCTTCAGGATGAGATTGGTACTGCTTTTTCTC |
| | | TTTTTAAGACTGATGAGGATATTACTGGTCGTCTTAAGGATCGTATTCAGCCTGAGATTCTTGAGGCTCTTCTTAAGCATATT |
| | | TCTTTTGATAAGTTTGTTCAGATTTCTCTTAAGGCTCTTCGTCGTATTGTTCCTCTTATGGAGCAGGGTAAGCGTTATGATGA |
| | | GGCTTGTGCTGAGATTTATGGTGATCATTATGGTAAGAAGAATACTGAGGAGAAGATTTATCTTCCTCCTATTCCTGCTGATG |
| | | AGATTCGTAATCCTGTTGTTCTTCGTGCTCTTTCTCAGGCTCGTAAGGTTATTAATGGTGTTGTTCGTCGTTATGGTTCTCCT |
| | | GCTCGTATTCATATTGAGACTGCTCGTGAGGTTGGTAAGTCTTTTAAGGATCGTAAGGAGATTGAGAAGCGTCAGGAGGAGAA |
| | | TCGTAAGGATCGTGAGAAGGCTGCTGCTAAGTTTCGTGAGTATTTTCCTAATTTTGTTGGTGAGCCTAAGTCTAAGGATATTC |
| | | TTAAGCTTCGTCTTTATGAGCAGCAGCATGGTAAGTGTCTTTATTCTGGTAAGGAGATTAATCTTGGTCGTCTTAATGAGAAG |
| | | GGTTATGTTGAGATTGATGCTGCTCTTCCTTTTTCTCGTACTTGGGATGATTCTTTTAATAATAAGGTTCTTGTTCTTGGTTC |
| | | TGAGAATCAGAATAAGGGTAATCAGACTCCTTATGAGTATTTTAATGGTAAGGATAATTCTCGTGAGTGGCAGGAGTTTAAGG |
| | | CTCGTGTTGAGACTTCTCGTTTTCCTCGTTCTAAGAAGCAGCGTATTCTTCTTCAGAAGTTTGATGAGGATGGTTTTAAGGAG |
| | | CGTAATCTTAATGATACTCGTTATGTTAATCGTTTTCTTTGTCAGTTTGTTGCTGATCGTATGCGTCTTACTGGTAAGGGTAA |
| | | GAAGCGTGTTTTTGCTTCTAATGGTCAGATTACTAATCTTCTTCGTGGTTTTTGGGGTCTTCGTAAGGTTCGTGCTGAGAATG |
| | | ATCGTCATCATGCTCTTGATGCTGTTGTTGTTGCTTGTTCTACTGTTGCTATGCAGCAGAAGATTACTCGTTTTGTTCGTTAT |
| | | AAGGAGATGAATGCTTTTGATGGTAAGACTATTGATAAGGAGACTGGTGAGGTTCTTCATCAGAAGACTCATTTTCCTCAGCC |
| | | TTGGGAGTTTTTTGCTCAGGAGGTTATGATTCGTGTTTTTGGTAAGCCTGATGGTAAGCCTGAGTTTGAGGAGGCTGATACTC |
| | | CTGAGAAGCTTCGTACTCTTCTTGCTGAGAAGCTTTCTTCTCGTCCTGAGGCTGTTCATGAGTATGTTACTCCTCTTTTTGTT |
| | | TCTCGTGCTCCTAATCGTAAGATGTCTGGTCAGGGTCATATGGAGACTGTTAAGTCTGCTAAGCGTCTTGATGAGGGTGTTTC |
| | | TGTTCTTCGTGTTCCTCTTACTCAGCTTAAGCTTAAGGATCTTGAGAAGATGGTTAATCGTGAGCGTGAGCCTAAGCTTTATG |
| | | AGGCTCTTAAGGCTCGTCTTGAGGCTCATAAGGATGATCCTGCTAAGGCTTTTGCTGAGCCTTTTTATAAGTATGATAAGGCT |
| | | GGTAATCGTACTCAGCAGGTTAAGGCTGTTCGTGTTGAGCAGGTTCAGAAGACTGGTGTTTGGGTTCGTAATCATAATGGTAT |
| | | TGCTGATAATGCTACTATGGTTCGTGTTGATGTTTTTGAGAAGGGTGATAAGTATTATCTTGTTCCTATTTATTCTTGGCAGG |
| | | TTGCTAAGGGTATTCTTCCTGATCGTGCTGTTGTTGCTTATGCTGATGAGGAGGATTGGACTGTTATTGATGAGTCTTTTCGT |
| | | TTTAAGTTTGTTCTTTATTCTAATGATCTTATTAAGGTTCAGCTTAAGAAGGATTCTTTTCTTGGTTATTTTTCTGGTCTTGA |
| | | TCGTGCTACTGGTGCTATTTCTCTTCGTGAGCATGATCTTGAGAAGTCTAAGGGTAAGGATGGTATGCATCGTATTGGTGTTA |
| | | AGACTGCTCTTTCTTTTCAGAAGTATCAGATTGATGAGATGGGTAAGGAGATTCGTCCTTGTCGTCTTAAGAAGCGTCCTCCT |
| | | GTTCGTUGA |
| Exemplary | 302 | ATGGCCGCCTTCAAGCCCAACCCCATCAACTACATCCTGGGCCTGGACATCGGCATCGCCTCCGTGGGCTGGGCCATGGTGGA |
| open | | GATCGACGAGGAGGAGAACCCCATCCGGCTGATCGACCTGGGCGTGCGGGTGTTCGAGCGGGCCGAGGTGCCCAAGACCGGCG |
| reading | | ACTCCCTGGCCATGGCCCGGCGGCTGGCCCGGTCCGTGCGGCGGCTGACCCGGCGGCGGGCCCACCGGCTGCTGCGGGCCCGG |
| frame for | | CGGCTGCTGAAGCGGGAGGGCGTGCTGCAGGCCGCCGACTTCGACGAGAACGGCCTGATCAAGTCCCTGCCCAACACCCCCTG |
| Nme3Cas9 | | GCAGCTGCGGGCCGCCGCCCTGGACCGGAAGCTGACCCCCCTGGAGTGGTCCGCCGTGCTGCTGCACCTGATCAAGCACCGGG |
| HNH | | GCTACCTGTCCCAGCGGAAGAACGAGGGCGAGACCGCCGACAAGGAGCTGGGCGCCCTGCTGAAGGGCGTGGCCGACAACGCC |
| nickase | | CACGCCCTGCAGACCGGCGACTTCCGGACCCCCGCCGAGCTGGCCCTGAACAAGTTCGAGAAGGAGTGCGGCCACATCCGGAA |
| | | CCAGCGGGGCGACTACTCCCACACCTTCTCCCGGAAGGACCTGCAGGCCGAGCTGAACCTGCTGTTCGAGAAGCAGAAGGAGT |
| | | TCGGCAACCCCCACGTGTCCGGCGGCCTGAAGGAGGGCATCGAGACCCTGCTGATGACCCAGCGGCCCGCCCTGTCCGGCGAC |
| | | GCCGTGCAGAAGATGCTGGGCCACTGCACCTTCGAGCCCGCCGAGCCCAAGGCCGCCAAGAACACCTACACCGCCGAGCGGTT |
| | | CATCTGGCTGACCAAGCTGAACAACCTGCGGATCCTGGAGCAGGGCTCCGAGCGGCCCCTGACCGACACCGAGCGGGCCACCC |
| | | TGATGGACGAGCCCTACCGGAAGTCCAAGCTGACCTACGCCCAGGCCCGGAAGCTGCTGTCCCTGGAGGACACCGCCTTCTTC |
| | | AAGGGCCTGCGGTACGGCAAGGACAACGCCGAGGCCTCCACCCTGATGGAGATGAAGGCCTACCACACCATCTCCCGGGCCCT |
| | | GGAGAAGGAGGGCCTGAAGGACAAGAAGTCCCCCCTGAACCTGTCCCCCGAGCTGCAGGACGAGATCGGCACCGCCTTCTCCC |
| | | TGTTCAAGACCGACGAGGACATCACCGGCCGGCTGAAGGACCGGATCCAGCCCGAGATCCTGGAGGCCCTGCTGAAGCACATC |
| | | TCCTTCGACAAGTTCGTGCAGATCTCCCTGAAGGCCCTGCGGCGGATCGTGCCCCTGATGGAGCAGGGCAAGCGGTACGACGA |
| | | GGCCTGCGCCGAGATCTACGGCGACCACTACGGCAAGAAGAACACCGAGGAGAAGATCTACCTGCCCCCCATCCCCGCCGACG |
| | | AGATCCGGAACCCCGTGGTGCTGCGGGCCCTGTCCCAGGCCCGGAAGGTGATCAACGGCGTGGTGCGGCGGTACGGCTCCCCC |
| | | GCCCGGATCCACATCGAGACCGCCCGGGAGGTGGGCAAGTCCTTCAAGGACCGGAAGGAGATCGAGAAGCGGCAGGAGGAGAA |
| | | CCGGAAGGACCGGGAGAAGGCCGCCGCCAAGTTCCGGGAGTACTTCCCCAACTTCGTGGGCGAGCCCAAGTCCAAGGACATCC |
| | | TGAAGCTGCGGCTGTACGAGCAGCAGCACGGCAAGTGCCTGTACTCCGGCAAGGAGATCAACCTGGGCCGGCTGAACGAGAAG |
| | | GGCTACGTGGAGATCGACGCCGCCCTGCCCTTCTCCCGGACCTGGGACGACTCCTTCAACAACAAGGTGCTGGTGCTGGGCTC |
| | | CGAGAACCAGAACAAGGGCAACCAGACCCCCTACGAGTACTTCAACGGCAAGGACAACTCCCGGGAGTGGCAGGAGTTCAAGG |
| | | CCCGGGTGGAGACCTCCCGGTTCCCCCGGTCCAAGAAGCAGCGGATCCTGCTGCAGAAGTTCGACGAGGACGGCTTCAAGGAG |
| | | CGGAACCTGAACGACACCCGGTACGTGAACCGGTTCCTGTGCCAGTTCGTGGCCGACCGGATGCGGCTGACCGGCAAGGGCAA |
| | | GAAGCGGGTGTTCGCCTCCAACGGCCAGATCACCAACCTGCTGCGGGGCTTCTGGGGCCTGCGGAAGGTGCGGGCCGAGAACG |
| | | ACCGGCACCACGCCCTGGACGCCGTGGTGGTGGCCTGCTCCACCGTGGCCATGCAGCAGAAGATCACCCGGTTCGTGCGGTAC |
| | | AAGGAGATGAACGCCTTCGACGGCAAGACCATCGACAAGGAGACCGGCGAGGTGCTGCACCAGAAGACCCACTTCCCCCAGCC |
| | | CTGGGAGTTCTTCGCCCAGGAGGTGATGATCCGGGTGTTCGGCAAGCCCGACGGCAAGCCCGAGTTCGAGGAGGCCGACACCC |
| | | CCGAGAAGCTGCGGACCCTGCTGGCCGAGAAGCTGTCCTCCCGGCCCGAGGCCGTGCACGAGTACGTGACCCCCCTGTTCGTG |
| | | TCCCGGGCCCCCAACCGGAAGATGTCCGGCCAGGGCCACATGGAGACCGTGAAGTCCGCCAAGCGGCTGGACGAGGGCGTGTC |
| | | CGTGCTGCGGGTGCCCCTGACCCAGCTGAAGCTGAAGGACCTGGAGAAGATGGTGAACCGGGAGCGGGAGCCCAAGCTGTACG |
| | | AGGCCCTGAAGGCCCGGCTGGAGGCCCACAAGGACGACCCCGCCAAGGCCTTCGCCGAGCCCTTCTACAAGTACGACAAGGCC |
| | | GGCAACCGGACCCAGCAGGTGAAGGCCGTGCGGGTGGAGCAGGTGCAGAAGACCGGCGTGTGGGTGCGGAACCACAACGGCAT |
| | | CGCCGACAACGCCACCATGGTGCGGGTGGACGTGTTCGAGAAGGGCGACAAGTACTACCTGGTGCCCATCTACTCCTGGCAGG |
| | | TGGCCAAGGGCATCCTGCCCGACCGGGCCGTGGTGGCCTACGCCGACGAGGAGGACTGGACCGTGATCGACGAGTCCTTCCGG |
| | | TTCAAGTTCGTGCTGTACTCCAACGACCTGATCAAGGTGCAGCTGAAGAAGGACTCCTTCCTGGGCTACTTCTCCGGCCTGGA |
| | | CCGGGCCACCGGCGCCATCTCCCTGCGGGAGCACGACCTGGAGAAGTCCAAGGGCAAGGACGGCATGCACCGGATCGGCGTGA |
| | | AGACCGCCCTGTCCTTCCAGAAGTACCAGATCGACGAGATGGGCAAGGAGATCCGGCCCTGCCGGCTGAAGAAGCGGCCCCCC |
| | | GTGCGGUGA |
| Exemplary | 303 | ATGGCAGCATTCAAACCAAACCCAATCAACTACATCCTAGGACTAGACATCGGAATCGCATCAGTAGGATGAGCAATGGTAGA |
| open | | AATCGACGAAGAAGAAAACCCAATCCGACTAATCGACCTAGGAGTACGAGTATTCGAACGAGCAGAAGTACCAAAAACAGGAG |
| reading | | ACTCACTAGCAATGGCACGACGACTAGCACGATCAGTACGACGACTAACACGACGACGAGCACACCGACTACTACGAGCACGA |
| frame for | | CGACTACTAAAACGAGAAGGAGTACTACAAGCAGCAGACTTCGACGAAAACGGACTAATCAAATCACTACCAAACACACCATG |
| Nme3Cas9 | | ACAACTACGAGCAGCAGCACTAGACCGAAAACTAACACCACTAGAATGATCAGCAGTACTACTACACCTAATCAAACACCGAG |
| HNH | | GATACCTATCACAACGAAAAAACGAAGGAGAAACAGCAGACAAAGAACTAGGAGCACTACTAAAAGGAGTAGCAGACAACGCA |
| nickase | | CACGCACTACAAACAGGAGACTTCCGAACACCAGCAGAACTAGCACTAAACAAATTCGAAAAAGAATGCGGACACATCCGAAA |
| | | CCAACGAGGAGACTACTCACACACATTCTCACGAAAAGACCTACAAGCAGAACTAAACCTACTATTCGAAAAACAAAAAGAAT |
| | | TCGGAAACCCACACGTATCAGGAGGACTAAAAGAAGGAATCGAAACACTACTAATGACACAACGACCAGCACTATCAGGAGAC |
| | | GCAGTACAAAAAATGCTAGGACACTGCACATTCGAACCAGCAGAACCAAAAGCAGCAAAAAACACATACACAGCAGAACGATT |
| | | CATCTGACTAACAAAACTAAACAACCTACGAATCCTAGAACAAGGATCAGAACGACCACTAACAGACACAGAACGAGCAACAC |
| | | TAATGGACGAACCATACCGAAAATCAAAACTAACATACGCACAAGCACGAAAACTACTATCACTAGAAGACACAGCATTCTTC |
| | | AAAGGACTACGATACGGAAAAGACAACGCAGAAGCATCAACACTAATGGAAATGAAAGCATACCACACAATCTCACGAGCACT |
| | | AGAAAAAGAAGGACTAAAAGACAAAAAATCACCACTAAACCTATCACCAGAACTACAAGACGAAATCGGAACAGCATTCTCAC |
| | | TATTCAAAACAGACGAAGACATCACAGGACGACTAAAAGACCGAATCCAACCAGAAATCCTAGAAGCACTACTAAAACACATC |
| | | TCATTCGACAAATTCGTACAAATCTCACTAAAAGCACTACGACGAATCGTACCACTAATGGAACAAGGAAAACGATACGACGA |
| | | AGCATGCGCAGAAATCTACGGAGACCACTACGGAAAAAAAAACACAGAAGAAAAAATCTACCTACCACCAATCCCAGCAGACG |
| | | AAATCCGAAACCCAGTAGTACTACGAGCACTATCACAAGCACGAAAAGTAATCAACGGAGTAGTACGACGATACGGATCACCA |
| | | GCACGAATCCACATCGAAACAGCACGAGAAGTAGGAAAATCATTCAAAGACCGAAAAGAAATCGAAAAACGACAAGAAGAAAA |
| | | CCGAAAAGACCGAGAAAAAGCAGCAGCAAAATTCCGAGAATACTTCCCAAACTTCGTAGGAGAACCAAAATCAAAAGACATCC |
| | | TAAAACTACGACTATACGAACAACAACACGGAAAATGCCTATACTCAGGAAAAGAAATCAACCTAGGACGACTAAACGAAAAA |
| | | GGATACGTAGAAATCGACGCAGCACTACCATTCTCACGAACATGAGACGACTCATTCAACAACAAAGTACTAGTACTAGGATC |
| | | AGAAAACCAAAACAAAGGAAACCAAACACCATACGAATACTTCAACGGAAAAGACAACTCACGAGAATGACAAGAATTCAAAG |
| | | CACGAGTAGAAACATCACGATTCCCACGATCAAAAAAACAACGAATCCTACTACAAAAATTCGACGAAGACGGATTCAAAGAA |
| | | CGAAACCTAAACGACACACGATACGTAAACCGATTCCTATGCCAATTCGTAGCAGACCGAATGCGACTAACAGGAAAAGGAAA |
| | | AAAACGAGTATTCGCATCAAACGGACAAATCACAAACCTACTACGAGGATTCTGAGGACTACGAAAAGTACGAGCAGAAAACG |
| | | ACCGACACCACGCACTAGACGCAGTAGTAGTAGCATGCTCAACAGTAGCAATGCAACAAAAAATCACACGATTCGTACGATAC |
| | | AAAGAAATGAACGCATTCGACGGAAAAACAATCGACAAAGAAACAGGAGAAGTACTACACCAAAAAACACACTTCCCACAACC |
| | | ATGAGAATTCTTCGCACAAGAAGTAATGATCCGAGTATTCGGAAAACCAGACGGAAAACCAGAATTCGAAGAAGCAGACACAC |
| | | CAGAAAAACTACGAACACTACTAGCAGAAAAACTATCATCACGACCAGAAGCAGTACACGAATACGTAACACCACTATTCGTA |
| | | TCACGAGCACCAAACCGAAAAATGTCAGGACAAGGACACATGGAAACAGTAAAATCAGCAAAACGACTAGACGAAGGAGTATC |
| | | AGTACTACGAGTACCACTAACACAACTAAAACTAAAAGACCTAGAAAAAATGGTAAACCGAGAACGAGAACCAAAACTATACG |
| | | AAGCACTAAAAGCACGACTAGAAGCACACAAAGACGACCCAGCAAAAGCATTCGCAGAACCATTCTACAAATACGACAAAGCA |
| | | GGAAACCGAACACAACAAGTAAAAGCAGTACGAGTAGAACAAGTACAAAAAACAGGAGTATGAGTACGAAACCACAACGGAAT |
| | | CGCAGACAACGCAACAATGGTACGAGTAGACGTATTCGAAAAAGGAGACAAATACTACCTAGTACCAATCTACTCATGACAAG |
| | | TAGCAAAAGGAATCCTACCAGACCGAGCAGTAGTAGCATACGCAGACGAAGAAGACTGAACAGTAATCGACGAATCATTCCGA |
| | | TTCAAATTCGTACTATACTCAAACGACCTAATCAAAGTACAACTAAAAAAAGACTCATTCCTAGGATACTTCTCAGGACTAGA |
| | | CCGAGCAACAGGAGCAATCTCACTACGAGAACACGACCTAGAAAAATCAAAAGGAAAAGACGGAATGCACCGAATCGGAGTAA |
| | | AAACAGCACTATCATTCCAAAAATACCAAATCGACGAAATGGGAAAAGAAATCCGACCATGCCGACTAAAAAAACGACCACCA |
| | | GTACGAUAA |
| Exemplary | 304 | GGGAAGCUCAGAAUAAACGCUCAACUUUGGCCGGAUCUGCCACCAUGGACGGCUCCGGCGGCGGCUCCCCCAAGAAGAAGCGG |
| coding | | AAGGUGGAGGACAAGCGGCCCGCCGCCACCAAGAAGGCCGGCCAGGCCAAGAAGAAGAAGGGCGGCUCCGGCGGCGGCGCCGC |
| sequence | | CUUCAAGCCCAACCCCAUCAACUACAUCCUGGGCCUGGACAUCGGCAUCGCCUCCGUGGGCUGGGCCAUGGUGGAGAUCGACG |
| encoding | | AGGAGGAGAACCCCAUCCGGCUGAUCGACCUGGGCGUGCGGGUGUUCGAGCGGGCCGAGGUGCCCAAGACCGGCGACUCCCUG |
| Nme2Cas9 | | GCCAUGGCCCGGCGGCUGGCCCGGUCCGUGCGGCGGCUGACCCGGCGGCGGGCCCACCGGCUGCUGCGGGCCCGGCGGCUGCU |
| | | GAAGCGGGAGGGCGUGCUGCAGGCCGCCGACUUCGACGAGAACGGCCUGAUCAAGUCCCUGCCCAACACCCCCUGGCAGCUGC |
| | | GGGCCGCCGCCCUGGACCGGAAGCUGACCCCCCUGGAGUGGUCCGCCGUGCUGCUGCACCUGAUCAAGCACCGGGGCUACCUG |
| | | UCCCAGCGGAAGAACGAGGGCGAGACCGCCGACAAGGAGCUGGGCGCCCUGCUGAAGGGCGUGGCCAACAACGCCCACGCCCU |
| | | GCAGACCGGCGACUUCCGGACCCCCGCCGAGCUGGCCCUGAACAAGUUCGAGAAGGAGUCCGGCCACAUCCGGAACCAGCGGG |
| | | GCGACUACUCCCACACCUUCUCCCGGAAGGACCUGCAGGCCGAGCUGAUCCUGCUGUUCGAGAAGCAGAAGGAGUUCGGCAAC |
| | | CCCCACGUGUCCGGCGGCCUGAAGGAGGGCAUCGAGACCCUGCUGAUGACCCAGCGGCCCGCCCUGUCCGGCGACGCCGUGCA |
| | | GAAGAUGCUGGGCCACUGCACCUUCGAGCCCGCCGAGCCCAAGGCCGCCAAGAACACCUACACCGCCGAGCGGUUCAUCUGGC |
| | | UGACCAAGCUGAACAACCUGCGGAUCCUGGAGCAGGGCUCCGAGCGGCCCCUGACCGACACCGAGCGGGCCACCCUGAUGGAC |
| | | GAGCCCUACCGGAAGUCCAAGCUGACCUACGCCCAGGCCCGGAAGCUGCUGGGCCUGGAGGACACCGCCUUCUUCAAGGGCCU |
| | | GCGGUACGGCAAGGACAACGCCGAGGCCUCCACCCUGAUGGAGAUGAAGGCCUACCACGCCAUCUCCCGGGCCCUGGAGAAGG |
| | | AGGGCCUGAAGGACAAGAAGUCCCCCCUGAACCUGUCCUCCGAGCUGCAGGACGAGAUCGGCACCGCCUUCUCCCUGUUCAAG |
| | | ACCGACGAGGACAUCACCGGCCGGCUGAAGGACCGGGUGCAGCCCGAGAUCCUGGAGGCCCUGCUGAAGCACAUCUCCUUCGA |
| | | CAAGUUCGUGCAGAUCUCCCUGAAGGCCCUGCGGCGGAUCGUGCCCCUGAUGGAGCAGGGCAAGCGGUACGACGAGGCCUGCG |
| | | CCGAGAUCUACGGCGACCACUACGGCAAGAAGAACACCGAGGAGAAGAUCUACCUGCCCCCCAUCCCCGCCGACGAGAUCCGG |
| | | AACCCCGUGGUGCUGCGGGCCCUGUCCCAGGCCCGGAAGGUGAUCAACGGCGUGGUGCGGCGGUACGGCUCCCCCGCCCGGAU |
| | | CCACAUCGAGACCGCCCGGGAGGUGGGCAAGUCCUUCAAGGACCGGAAGGAGAUCGAGAAGCGGCAGGAGGAGAACCGGAAGG |
| | | ACCGGGAGAAGGCCGCCGCCAAGUUCCGGGAGUACUUCCCCAACUUCGUGGGCGAGCCCAAGUCCAAGGACAUCCUGAAGCUG |
| | | CGGCUGUACGAGCAGCAGCACGGCAAGUGCCUGUACUCCGGCAAGGAGAUCAACCUGGUGCGGCUGAACGAGAAGGGCUACGU |
| | | GGAGAUCGACCACGCCCUGCCCUUCUCCCGGACCUGGGACGACUCCUUCAACAACAAGGUGCUGGUGCUGGGCUCCGAGAACC |
| | | AGAACAAGGGCAACCAGACCCCCUACGAGUACUUCAACGGCAAGGACAACUCCCGGGAGUGGCAGGAGUUCAAGGCCCGGGUG |
| | | GAGACCUCCCGGUUCCCCCGGUCCAAGAAGCAGCGGAUCCUGCUGCAGAAGUUCGACGAGGACGGCUUCAAGGAGUGCAACCU |
| | | GAACGACACCCGGUACGUGAACCGGUUCCUGUGCCAGUUCGUGGCCGACCACAUCCUGCUGACCGGCAAGGGCAAGCGGCGGG |
| | | UGUUCGCCUCCAACGGCCAGAUCACCAACCUGCUGCGGGGCUUCUGGGGCCUGCGGAAGGUGCGGGCCGAGAACGACCGGCAC |
| | | CACGCCCUGGACGCCGUGGUGGUGGCCUGCUCCACCGUGGCCAUGCAGCAGAAGAUCACCCGGUUCGUGCGGUACAAGGAGAU |
| | | GAACGCCUUCGACGGCAAGACCAUCGACAAGGAGACCGGCAAGGUGCUGCACCAGAAGACCCACUUCCCCCAGCCCUGGGAGU |
| | | UCUUCGCCCAGGAGGUGAUGAUCCGGGUGUUCGGCAAGCCCGACGGCAAGCCCGAGUUCGAGGAGGCCGACACCCCCGAGAAG |
| | | CUGCGGACCCUGCUGGCCGAGAAGCUGUCCUCCCGGCCCGAGGCCGUGCACGAGUACGUGACCCCCCUGUUCGUGUCCCGGGC |
| | | CCCCAACCGGAAGAUGUCCGGCGCCCACAAGGACACCCUGCGGUCCGCCAAGCGGUUCGUGAAGCACAACGAGAAGAUCUCCG |
| | | UGAAGCGGGUGUGGCUGACCGAGAUCAAGCUGGCCGACCUGGAGAACAUGGUGAACUACAAGAACGGCCGGGAGAUCGAGCUG |
| | | UACGAGGCCCUGAAGGCCCGGCUGGAGGCCUACGGCGGCAACGCCAAGCAGGCCUUCGACCCCAAGGACAACCCCUUCUACAA |
| | | GAAGGGCGGCCAGCUGGUGAAGGCCGUGCGGGUGGAGAAGACCCAGGAGUCCGGCGUGCUGCUGAACAAGAAGAACGCCUACA |
| | | CCAUCGCCGACAACGGCGACAUGGUGCGGGUGGACGUGUUCUGCAAGGUGGACAAGAAGGGCAAGAACCAGUACUUCAUCGUG |
| | | CCCAUCUACGCCUGGCAGGUGGCCGAGAACAUCCUGCCCGACAUCGACUGCAAGGGCUACCGGAUCGACGACUCCUACACCUU |
| | | CUGCUUCUCCCUGCACAAGUACGACCUGAUCGCCUUCCAGAAGGACGAGAAGUCCAAGGUGGAGUUCGCCUACUACAUCAACU |
| | | GCGACUCCUCCAACGGCCGGUUCUACCUGGCCUGGCACGACAAGGGCUCCAAGGAGCAGCAGUUCCGGAUCUCCACCCAGAAC |
| | | CUGGUGCUGAUCCAGAAGUACCAGGUGAACGAGCUGGGCAAGGAGAUCCGGCCCUGCCGGCUGAAGAAGCGGCCCCCCGUGCG |
| | | GUAGCUAGCACCAGCCUCAAGAACACCCGAAUGGAGUCUCUAAGCUACAUAAUACCAACUUACACUUUACAAAAUGUUGUCCC |
| | | CCAAAAUGUAGCCAUUCGUAUCUGCUCCUAAUAAAAAGAAAGUUUCUUCACAUUCUCAAAAAAAAAAAAAAAAAAAAAAAAAA |
| | | AAAAAAAAAAAAAAAAAAAAAAAAAAAAAAAAAAAAAAAAAAAAAAAAAAAAAAAAAAAAAAAAAAAAAAAAAAAAAAAAAAA |
| | | AAAAAAAAAAAAAAAAAAAAAAAAAAAAAAAAAAAAAAAAAAAAAAAAAAAAAAAAAAAAAAAAAAAAAAAAAAAAAAAAAAA |
| | | AAAAAAAAAAAAAAAAAAAAAAAAAAAAAAAAAAAAAAAAAAAAAAAAAAAAAAAAAA |
| Exemplary | 305 | GGGUCCCGCAGUCGGCGUCCAGCGGCUCUGCUUGUUCGUGUGUGUGUCGUUGCAGGCCUUAUUCGGAUCCGCCACCAUGGCAG |
| coding | | CAUUCAAGCCGAACUCGAUCAACUACAUCCUGGGACUGGACAUCGGAAUCGCAUCGGUCGGAUGGGCAAUGGUCGAAAUCGAC |
| sequence | | GAAGAAGAAAACCCGAUCAGACUGAUCGACCUGGGAGUCAGAGUCUUCGAAAGAGCAGAAGUCCCGAAGACAGGAGACUCGCU |
| encoding | | GGCAAUGGCAAGAAGACUGGCAAGAUCGGUCAGAAGACUGACAAGAAGAAGAGCACACAGACUGCUGAGAACAAGAAGACUGC |
| Nme1Cas9 | | UGAAGAGAGAAGGAGUCCUGCAGGCAGCAAACUUCGACGAAAACGGACUGAUCAAGUCGCUGCCGAACACACCGUGGCAGCUG |
| | | AGAGCAGCAGCACUGGACAGAAAGCUGACACCGCUGGAAUGGUCGGCAGUCCUGCUGCACCUGAUCAAGCACAGAGGAUACCU |
| | | GUCGCAGAGAAAGAACGAAGGAGAAACAGCAGACAAGGAACUGGGAGCACUGCUGAAGGGAGUCGCAGGAAACGCACACGCAC |
| | | UGCAGACAGGAGACUUCAGAACACCGGCAGAACUGGCACUGAACAAGUUCGAAAAGGAAUCGGGACACAUCAGAAACCAGAGA |
| | | UCGGACUACUCGCACACAUUCUCGAGAAAGGACCUGCAGGCAGAACUGAUCCUGCUGUUCGAAAAGCAGAAGGAAUUCGGAAA |
| | | CCCGCACGUCUCGGGAGGACUGAAGGAAGGAAUCGAAACACUGCUGAUGACACAGAGACCGGCACUGUCGGGAGACGCAGUCC |
| | | AGAAGAUGCUGGGACACUGCACAUUCGAACCGGCAGAACCGAAGGCAGCAAAGAACACAUACACAGCAGAAAGAUUCAUCUGG |
| | | CUGACAAAGCUGAACAACCUGAGAAUCCUGGAACAGGGAUCGGAAAGACCGCUGACAGACACAGAAAGAGCAACACUGAUGGA |
| | | CGAACCGUACAGAAAGUCGAAGCUGACAUACGCACAGGCAAGAAAGCUGCUGGGACUGGAAGACACAGCAUUCUUCAAGGGAC |
| | | UGAGAUACGGAAAGGACAACGCAGAAGCAUCGACACUGAUGGAAAUGAAGGCAUACCACGCAAUCUCGAGAGCACUGGAAAAG |
| | | GAAGGACUGAAGGACAAGAAGUCGCCGCUGAACCUGUCGCCGGAACUGCAGGACGAAAUCGGAACAGCAUUCUCGCUGUUCAA |
| | | GACAGACGAAGACAUCACAGGAAGACUGAAGGACAGAAUCCAGCCGGAAAUCCUGGAAGCACUGCUGAAGCACAUCUCGUUCG |
| | | ACAAGUUCGUCCAGAUCUCGCUGAAGGCACUGAGAAGAAUCGUCCCGCUGAUGGAACAGGGAAAGAGAUACGACGAAGCAUGC |
| | | GCAGAAAUCUACGGAGACCACUACGGAAAGAAGAACACAGAAGAAAAGAUCUACCUGCCGCCGAUCCCGGCAGACGAAAUCAG |
| | | AAACCCGGUCGUCCUGAGAGCACUGUCGCAGGCAAGAAAGGUCAUCAACGGAGUCGUCAGAAGAUACGGAUCGCCGGCAAGAA |
| | | UCCACAUCGAAACAGCAAGAGAAGUCGGAAAGUCGUUCAAGGACAGAAAGGAAAUCGAAAAGAGACAGGAAGAAAACAGAAAG |
| | | GACAGAGAAAAGGCAGCAGCAAAGUUCAGAGAAUACUUCCCGAACUUCGUCGGAGAACCGAAGUCGAAGGACAUCCUGAAGCU |
| | | GAGACUGUACGAACAGCAGCACGGAAAGUGCCUGUACUCGGGAAAGGAAAUCAACCUGGGAAGACUGAACGAAAAGGGAUACG |
| | | UCGAAAUCGACCACGCACUGCCGUUCUCGAGAACAUGGGACGACUCGUUCAACAACAAGGUCCUGGUCCUGGGAUCGGAAAAC |
| | | CAGAACAAGGGAAACCAGACACCGUACGAAUACUUCAACGGAAAGGACAACUCGAGAGAAUGGCAGGAAUUCAAGGCAAGAGU |
| | | CGAAACAUCGAGAUUCCCGAGAUCGAAGAAGCAGAGAAUCCUGCUGCAGAAGUUCGACGAAGACGGAUUCAAGGAAAGAAACC |
| | | UGAACGACACAAGAUACGUCAACAGAUUCCUGUGCCAGUUCGUCGCAGACAGAAUGAGACUGACAGGAAAGGGAAAGAAGAGA |
| | | GUCUUCGCAUCGAACGGACAGAUCACAAACCUGCUGAGAGGAUUCUGGGGACUGAGAAAGGUCAGAGCAGAAAACGACAGACA |
| | | CCACGCACUGGACGCAGUCGUCGUCGCAUGCUCGACAGUCGCAAUGCAGCAGAAGAUCACAAGAUUCGUCAGAUACAAGGAAA |
| | | UGAACGCAUUCGACGGAAAGACAAUCGACAAGGAAACAGGAGAAGUCCUGCACCAGAAGACACACUUCCCGCAGCCGUGGGAA |
| | | UUCUUCGCACAGGAAGUCAUGAUCAGAGUCUUCGGAAAGCCGGACGGAAAGCCGGAAUUCGAAGAAGCAGACACACUGGAAAA |
| | | GCUGAGAACACUGCUGGCAGAAAAGCUGUCGUCGAGACCGGAAGCAGUCCACGAAUACGUCACACCGCUGUUCGUCUCGAGAG |
| | | CACCGAACAGAAAGAUGUCGGGACAGGGACACAUGGAAACAGUCAAGUCGGCAAAGAGACUGGACGAAGGAGUCUCGGUCCUG |
| | | AGAGUCCCGCUGACACAGCUGAAGCUGAAGGACCUGGAAAAGAUGGUCAACAGAGAAAGAGAACCGAAGCUGUACGAAGCACU |
| | | GAAGGCAAGACUGGAAGCACACAAGGACGACCCGGCAAAGGCAUUCGCAGAACCGUUCUACAAGUACGACAAGGCAGGAAACA |
| | | GAACACAGCAGGUCAAGGCAGUCAGAGUCGAACAGGUCCAGAAGACAGGAGUCUGGGUCAGAAACCACAACGGAAUCGCAGAC |
| | | AACGCAACAAUGGUCAGAGUAGACGUCUUCGAAAAGGGAGACAAGUACUACCUGGUCCCGAUCUACUCGUGGCAGGUCGCAAA |
| | | GGGAAUCCUGCCGGACAGAGCAGUCGUCCAGGGAAAGGACGAAGAAGACUGGCAGCUGAUCGACGACUCGUUCAACUUCAAGU |
| | | UCUCGCUGCACCCGAACGACCUGGUCGAAGUCAUCACAAAGAAGGCAAGAAUGUUCGGAUACUUCGCAUCGUGCCACAGAGGA |
| | | ACAGGAAACAUCAACAUCAGAAUCCACGACCUGGACCACAAGAUCGGAAAGAACGGAAUCCUGGAAGGAAUCGGAGUCAAGAC |
| | | AGCACUGUCGUUCCAGAAGUACCAGAUCGACGAACUGGGAAAGGAAAUCAGACCGUGCAGACUGAAGAAGAGACCGCCGGUCA |
| | | GAUCCGGAAAGAGAACAGCAGACGGAUCGGAAUUCGAAUCGCCGAAGAAGAAGAGAAAGGUCGAAUGAUAGCUAGCCAUCACA |
| | | UUUAAAAGCAUCUCAGCCUACCAUGAGAAUAAGAGAAAGAAAAUGAAGAUCAAUAGCUUAUUCAUCUCUUUUUCUUUUUCGUU |
| | | GGUGUAAAGCCAACACCCUGUCUAAAAAACAUAAAUUUCUUUAAUCAUUUUGCCUCUUUUCUCUGUGCUUCAAUUAAUAAAAA |
| | | AUGGAAAGAACCUCGAGAAAAAAAAAAAAAAAAAAAAAAAAAAAAAAAAAAAAAAAAAAAAAAAAAAAAAAAAAAAAAAAAAA |
| | | AAAAAAAAAAAAAAAAAAAAAAAAAAAUCUAG |
| Exemplary | 306 | GGGAAGCUCAGAAUAAACGCUCAACUUUGGCCGGAUCUGCCACCAUGGACGGCUCCGGCGGCGGCUCCCCCAAGAAGAAGCGG |
| coding | | AAGGUGGAGGACAAGCGGCCCGCCGCCACCAAGAAGGCCGGCCAGGCCAAGAAGAAGAAGGGCGGCUCCGGCGGCGGCGCCGC |
| sequence | | CUUCAAGCCCAACCCCAUCAACUACAUCCUGGGCCUGGACAUCGGCAUCGCCUCCGUGGGCUGGGCCAUGGUGGAGAUCGACG |
| encoding | | AGGAGGAGAACCCCAUCCGGCUGAUCGACCUGGGCGUGCGGGUGUUCGAGCGGGCCGAGGUGCCCAAGACCGGCGACUCCCUG |
| Nme2Cas9 | | GCCAUGGCCCGGCGGCUGGCCCGGUCCGUGCGGCGGCUGACCCGGCGGCGGGCCCACCGGCUGCUGCGGGCCCGGCGGCUGCU |
| with | | GAAGCGGGAGGGCGUGCUGCAGGCCGCCGACUUCGACGAGAACGGCCUGAUCAAGUCCCUGCCCAACACCCCCUGGCAGCUGC |
| HiBiT tag | | GGGCCGCCGCCCUGGACCGGAAGCUGACCCCCCUGGAGUGGUCCGCCGUGCUGCUGCACCUGAUCAAGCACCGGGGCUACCUG |
| | | UCCCAGCGGAAGAACGAGGGCGAGACCGCCGACAAGGAGCUGGGCGCCCUGCUGAAGGGCGUGGCCAACAACGCCCACGCCCU |
| | | GCAGACCGGCGACUUCCGGACCCCCGCCGAGCUGGCCCUGAACAAGUUCGAGAAGGAGUCCGGCCACAUCCGGAACCAGCGGG |
| | | GCGACUACUCCCACACCUUCUCCCGGAAGGACCUGCAGGCCGAGCUGAUCCUGCUGUUCGAGAAGCAGAAGGAGUUCGGCAAC |
| | | CCCCACGUGUCCGGCGGCCUGAAGGAGGGCAUCGAGACCCUGCUGAUGACCCAGCGGCCCGCCCUGUCCGGCGACGCCGUGCA |
| | | GAAGAUGCUGGGCCACUGCACCUUCGAGCCCGCCGAGCCCAAGGCCGCCAAGAACACCUACACCGCCGAGCGGUUCAUCUGGC |
| | | UGACCAAGCUGAACAACCUGCGGAUCCUGGAGCAGGGCUCCGAGCGGCCCCUGACCGACACCGAGCGGGCCACCCUGAUGGAC |
| | | GAGCCCUACCGGAAGUCCAAGCUGACCUACGCCCAGGCCCGGAAGCUGCUGGGCCUGGAGGACACCGCCUUCUUCAAGGGCCU |
| | | GCGGUACGGCAAGGACAACGCCGAGGCCUCCACCCUGAUGGAGAUGAAGGCCUACCACGCCAUCUCCCGGGCCCUGGAGAAGG |
| | | AGGGCCUGAAGGACAAGAAGUCCCCCCUGAACCUGUCCUCCGAGCUGCAGGACGAGAUCGGCACCGCCUUCUCCCUGUUCAAG |
| | | ACCGACGAGGACAUCACCGGCCGGCUGAAGGACCGGGUGCAGCCCGAGAUCCUGGAGGCCCUGCUGAAGCACAUCUCCUUCGA |
| | | CAAGUUCGUGCAGAUCUCCCUGAAGGCCCUGCGGCGGAUCGUGCCCCUGAUGGAGCAGGGCAAGCGGUACGACGAGGCCUGCG |
| | | CCGAGAUCUACGGCGACCACUACGGCAAGAAGAACACCGAGGAGAAGAUCUACCUGCCCCCCAUCCCCGCCGACGAGAUCCGG |
| | | AACCCCGUGGUGCUGCGGGCCCUGUCCCAGGCCCGGAAGGUGAUCAACGGCGUGGUGCGGCGGUACGGCUCCCCCGCCCGGAU |
| | | CCACAUCGAGACCGCCCGGGAGGUGGGCAAGUCCUUCAAGGACCGGAAGGAGAUCGAGAAGCGGCAGGAGGAGAACCGGAAGG |
| | | ACCGGGAGAAGGCCGCCGCCAAGUUCCGGGAGUACUUCCCCAACUUCGUGGGCGAGCCCAAGUCCAAGGACAUCCUGAAGCUG |
| | | CGGCUGUACGAGCAGCAGCACGGCAAGUGCCUGUACUCCGGCAAGGAGAUCAACCUGGUGCGGCUGAACGAGAAGGGCUACGU |
| | | GGAGAUCGACCACGCCCUGCCCUUCUCCCGGACCUGGGACGACUCCUUCAACAACAAGGUGCUGGUGCUGGGCUCCGAGAACC |
| | | AGAACAAGGGCAACCAGACCCCCUACGAGUACUUCAACGGCAAGGACAACUCCCGGGAGUGGCAGGAGUUCAAGGCCCGGGUG |
| | | GAGACCUCCCGGUUCCCCCGGUCCAAGAAGCAGCGGAUCCUGCUGCAGAAGUUCGACGAGGACGGCUUCAAGGAGUGCAACCU |
| | | GAACGACACCCGGUACGUGAACCGGUUCCUGUGCCAGUUCGUGGCCGACCACAUCCUGCUGACCGGCAAGGGCAAGCGGCGGG |
| | | UGUUCGCCUCCAACGGCCAGAUCACCAACCUGCUGCGGGGCUUCUGGGGCCUGCGGAAGGUGCGGGCCGAGAACGACCGGCAC |
| | | CACGCCCUGGACGCCGUGGUGGUGGCCUGCUCCACCGUGGCCAUGCAGCAGAAGAUCACCCGGUUCGUGCGGUACAAGGAGAU |
| | | GAACGCCUUCGACGGCAAGACCAUCGACAAGGAGACCGGCAAGGUGCUGCACCAGAAGACCCACUUCCCCCAGCCCUGGGAGU |
| | | UCUUCGCCCAGGAGGUGAUGAUCCGGGUGUUCGGCAAGCCCGACGGCAAGCCCGAGUUCGAGGAGGCCGACACCCCCGAGAAG |
| | | CUGCGGACCCUGCUGGCCGAGAAGCUGUCCUCCCGGCCCGAGGCCGUGCACGAGUACGUGACCCCCCUGUUCGUGUCCCGGGC |
| | | CCCCAACCGGAAGAUGUCCGGCGCCCACAAGGACACCCUGCGGUCCGCCAAGCGGUUCGUGAAGCACAACGAGAAGAUCUCCG |
| | | UGAAGCGGGUGUGGCUGACCGAGAUCAAGCUGGCCGACCUGGAGAACAUGGUGAACUACAAGAACGGCCGGGAGAUCGAGCUG |
| | | UACGAGGCCCUGAAGGCCCGGCUGGAGGCCUACGGCGGCAACGCCAAGCAGGCCUUCGACCCCAAGGACAACCCCUUCUACAA |
| | | GAAGGGCGGCCAGCUGGUGAAGGCCGUGCGGGUGGAGAAGACCCAGGAGUCCGGCGUGCUGCUGAACAAGAAGAACGCCUACA |
| | | CCAUCGCCGACAACGGCGACAUGGUGCGGGUGGACGUGUUCUGCAAGGUGGACAAGAAGGGCAAGAACCAGUACUUCAUCGUG |
| | | CCCAUCUACGCCUGGCAGGUGGCCGAGAACAUCCUGCCCGACAUCGACUGCAAGGGCUACCGGAUCGACGACUCCUACACCUU |
| | | CUGCUUCUCCCUGCACAAGUACGACCUGAUCGCCUUCCAGAAGGACGAGAAGUCCAAGGUGGAGUUCGCCUACUACAUCAACU |
| | | GCGACUCCUCCAACGGCCGGUUCUACCUGGCCUGGCACGACAAGGGCUCCAAGGAGCAGCAGUUCCGGAUCUCCACCCAGAAC |
| | | CUGGUGCUGAUCCAGAAGUACCAGGUGAACGAGCUGGGCAAGGAGAUCCGGCCCUGCCGGCUGAAGAAGCGGCCCCCCGUGCG |
| | | GUCCGAGUCCGCCACCCCCGAGUCCGUGUCCGGCUGGCGGCUGUUCAAGAAGAUCUCCUAGCUAGCACCAGCCUCAAGAACAC |
| | | CCGAAUGGAGUCUCUAAGCUACAUAAUACCAACUUACACUUUACAAAAUGUUGUCCCCCAAAAUGUAGCCAUUCGUAUCUGCU |
| | | CCUAAUAAAAAGAAAGUUUCUUCACAUUCUAAAAAAAAAAAAUGGAAAAAAAAAAAACGGAAAAAAAAAAAAGGUAAAAAAAA |
| | | AAAAUAUAAAAAAAAAAAACAUAAAAAAAAAAAACGAAAAAAAAAAAACGUAAAAAAAAAAAACUCAAAAAAAAAAAAGAUAA |
| | | AAAAAAAAAACCUAAAAAAAAAAAAUGUAAAAAAAAAAAAGGGAAAAAAAAAAAACGCAAAAAAAAAAAACACAAAAAAAAAA |
| | | AAUGCAAAAAAAAAAAAUCGAAAAAAAAAAAAUCUAAAAAAAAAAAACGAAAAAAAAAAAACCCAAAAAAAAAAAAGACAAAA |
| | | AAAAAAAAUAGAAAAAAAAAAAAGUUAAAAAAAAAAAACUGAAAAAAAAAAAAUUUAAAAAAAAAAAAUCUCGA |
| Exemplary | 307 | GGGAAGCUCAGAAUAAACGCUCAACUUUGGCCGGAUCUGCCACCAUGGACGGCUCCGGCGGCGGCUCCCCCAAGAAGAAGCGG |
| coding | | AAGGUGGAGGACAAGCGGCCCGCCGCCACCAAGAAGGCCGGCCAGGCCAAGAAGAAGAAGGGCGGCUCCGGCGGCGGCGCAGC |
| sequence | | AUUCAAGCCAAACUCAAUCAAUUACAUCCUGGGACUGGACAUCGGCAUCGCAUCCGUCGGGUGGGCUAUGGUCGAAAUCGACG |
| encoding | | AGGAGGAGAACCCCAUCCGCCUGAUCGAUCUGGGCGUGCGCGUGUUUGAGAGGGCAGAGGUGCCUAAGACCGGCGACAGCCUG |
| Nme1Cas9 | | GCCAUGGCACGGAGACUGGCACGCUCCGUGAGGCGCCUGACCCGGAGAAGGGCCCACAGACUGCUGAGGACACGCCGGCUGCU |
| with | | GAAGAGGGAGGGCGUGCUGCAGGCCGCCAACUUCGAUGAGAAUGGCCUGAUCAAGUCCCUGCCCAAUACCCCUUGGCAGCUGA |
| HiBiT tag | | GGGCAGCCGCCCUGGACCGCAAGCUGACACCUCUGGAGUGGUCCGCCGUGCUGCUGCACCUGAUCAAGCACCGGGGCUACCUG |
| | | UCUCAGAGAAAGAACGAGGGCGAGACAGCCGAUAAGGAGCUGGGCGCCCUGCUGAAGGGAGUGGCAGGAAAUGCACACGCCCU |
| | | GCAGACCGGCGACUUUCGCACACCAGCCGAGCUGGCCCUGAACAAGUUCGAGAAGGAGAGCGGCCACAUCCGCAAUCAGCGGU |
| | | CUGACUAUAGCCACACCUUCUCCCGGAAGGAUCUGCAGGCCGAGCUGAUCCUGCUGUUUGAGAAGCAGAAGGAGUUCGGCAAC |
| | | CCACACGUGUCUGGCGGCCUGAAGGAGGGCAUCGAGACACUGCUGAUGACACAGCGGCCCGCCCUGAGCGGCGACGCAGUGCA |
| | | GAAGAUGCUGGGACACUGCACCUUUGAGCCAGCCGAGCCCAAGGCCGCCAAGAAUACCUACACAGCCGAGCGGUUCAUCUGGC |
| | | UGACAAAGCUGAACAAUCUGAGGAUCCUGGAGCAGGGAAGCGAGCGCCCACUGACCGACACAGAGAGGGCCACCCUGAUGGAU |
| | | GAGCCCUACCGCAAGUCCAAGCUGACAUAUGCACAGGCAAGGAAGCUGCUGGGCCUGGAGGACACCGCCUUCUUUAAGGGCCU |
| | | GAGAUACGGCAAGGAUAACGCCGAGGCCUCUACACUGAUGGAGAUGAAGGCCUAUCACGCCAUCAGCAGGGCCCUGGAGAAGG |
| | | AGGGCCUGAAGGACAAGAAGUCCCCACUGAAUCUGUCUCCCGAGCUGCAGGAUGAGAUCGGCACCGCCUUUAGCCUGUUCAAG |
| | | ACCGACGAGGAUAUCACAGGCAGACUGAAGGACAGGAUCCAGCCAGAGAUCCUGGAGGCCCUGCUGAAGCACAUCAGCUUUGA |
| | | UAAGUUCGUGCAGAUCAGCCUGAAGGCCCUGCGGAGGAUCGUGCCACUGAUGGAGCAGGGCAAGAGGUACGACGAGGCCUGCG |
| | | CCGAAAUCUACGGCGAUCACUAUGGCAAGAAGAACACAGAGGAGAAAAUCUACCUGCCCCCUAUCCCCGCCGAUGAGAUCAGG |
| | | AACCCUGUGGUGCUGCGCGCCCUGUCUCAGGCAAGAAAAGUGAUCAACGGAGUGGUGCGCCGGUACGGCAGCCCCGCCAGAAU |
| | | CCACAUCGAGACAGCCAGGGAAGUGGGCAAGUCCUUUAAGGACAGAAAGGAGAUCGAGAAGAGGCAGGAGGAGAACAGAAAGG |
| | | AUAGGGAGAAGGCCGCCGCCAAGUUCAGAGAGUACUUUCCUAAUUUCGUGGGCGAGCCAAAGUCCAAGGAUAUCCUGAAGCUG |
| | | AGGCUGUACGAGCAGCAGCACGGCAAGUGUCUGUAUUCUGGCAAGGAGAUCAACCUGGGCCGCCUGAAUGAGAAGGGCUAUGU |
| | | GGAGAUCGACCACGCCCUGCCUUUUUCUCGGACCUGGGACGAUAGCUUCAACAAUAAGGUGCUGGUGCUGGGCUCUGAGAACC |
| | | AGAAUAAGGGCAACCAGACACCCUACGAGUAUUUCAACGGCAAGGACAAUAGCCGCGAGUGGCAGGAGUUUAAGGCAAGGGUG |
| | | GAGACAAGCAGGUUCCCUCGGUCCAAGAAGCAGAGAAUCCUGCUGCAGAAGUUUGACGAGGAUGGCUUCAAGGAGAGGAACCU |
| | | GAAUGACACCCGCUACGUGAAUCGGUUUCUGUGCCAGUUCGUGGCCGAUAGAAUGAGGCUGACCGGCAAGGGCAAGAAGAGAG |
| | | UGUUUGCCUCCAACGGCCAGAUCACAAAUCUGCUGAGGGGCUUCUGGGGCCUGAGAAAGGUGAGGGCAGAGAACGACAGGCAC |
| | | CACGCACUGGAUGCAGUGGUGGUGGCAUGUUCUACCGUGGCCAUGCAGCAGAAGAUCACACGCUUUGUGCGGUAUAAGGAGAU |
| | | GAAUGCCUUCGACGGCAAGACCAUCGAUAAGGAGACAGGCGAGGUGCUGCACCAGAAGACACACUUUCCUCAGCCAUGGGAGU |
| | | UCUUUGCCCAGGAAGUGAUGAUCCGGGUGUUUGGCAAGCCUGACGGCAAGCCAGAGUUCGAGGAGGCCGAUACCCUGGAGAAG |
| | | CUGAGAACACUGCUGGCAGAGAAGCUGAGCUCCAGGCCCGAGGCAGUGCACGAGUACGUGACCCCACUGUUCGUGUCUAGAGC |
| | | CCCCAACAGGAAGAUGAGCGGCCAGGGCCACAUGGAGACAGUGAAGUCCGCCAAGAGACUGGACGAGGGCGUGUCUGUGCUGA |
| | | GGGUGCCUCUGACACAGCUGAAGCUGAAGGAUCUGGAGAAGAUGGUGAAUCGCGAGCGGGAGCCAAAGCUGUAUGAGGCCCUG |
| | | AAGGCAAGGCUGGAGGCACACAAGGACGAUCCUGCCAAGGCCUUUGCCGAGCCAUUCUACAAGUAUGAUAAGGCCGGCAACAG |
| | | AACCCAGCAGGUGAAGGCCGUGAGGGUGGAGCAGGUGCAGAAGACAGGCGUGUGGGUGCGCAACCACAAUGGCAUCGCCGACA |
| | | AUGCUACCAUGGUGCGGGUGGACGUGUUUGAGAAGGGCGAUAAGUACUAUCUGGUGCCCAUCUACAGCUGGCAGGUGGCCAAG |
| | | GGCAUCCUGCCUGAUAGAGCCGUGGUGCAGGGCAAGGACGAGGAGGAUUGGCAGCUGAUCGACGAUUCCUUCAACUUUAAGUU |
| | | CUCUCUGCACCCCAAUGACCUGGUGGAAGUGAUCACCAAGAAGGCCAGGAUGUUUGGCUACUUCGCCUCCUGCCACCGCGGCA |
| | | CAGGCAACAUCAAUAUCCGGAUCCACGACCUGGAUCACAAGAUCGGCAAGAACGGCAUCCUGGAGGGCAUCGGCGUGAAGACA |
| | | GCCCUGAGCUUCCAGAAGUAUCAGAUCGACGAGCUGGGCAAGGAGAUCAGACCUUGUAGGCUGAAGAAGCGCCCACCCGUGCG |
| | | GUCCGAGUCCGCCACCCCCGAGUCCGUGUCCGGCUGGCGGCUGUUCAAGAAGAUCUCCUAGCUAGCACCAGCCUCAAGAACAC |
| | | CCGAAUGGAGUCUCUAAGCUACAUAAUACCAACUUACACUUUACAAAAUGUUGUCCCCCAAAAUGUAGCCAUUCGUAUCUGCU |
| | | CCUAAUAAAAAGAAAGUUUCUUCACAUUCUAAAAAAAAAAAAUGGAAAAAAAAAAAACGGAAAAAAAAAAAAGGUAAAAAAAA |
| | | AAAAUAUAAAAAAAAAAAACAUAAAAAAAAAAAACGAAAAAAAAAAAACGUAAAAAAAAAAAACUCAAAAAAAAAAAAGAUAA |
| | | AAAAAAAAAACCUAAAAAAAAAAAAUGUAAAAAAAAAAAAGGGAAAAAAAAAAAACGCAAAAAAAAAAAACACAAAAAAAAAA |
| | | AAUGCAAAAAAAAAAAAUCGAAAAAAAAAAAAUCUAAAAAAAAAAAACGAAAAAAAAAAAACCCAAAAAAAAAAAAGACAAAA |
| | | AAAAAAAAUAGAAAAAAAAAAAAGUUAAAAAAAAAAAACUGAAAAAAAAAAAAUUUAAAAAAAAAAAAUCUCGA |
| Exemplary | 308 | GGGAAGCUCAGAAUAAACGCUCAACUUUGGCCGGAUCUGCCACCAUGGACGGCUCCGGCGGCGGCUCCCCCAAGAAGAAGCGG |
| coding | | AAGGUGGAGGACAAGCGGCCCGCCGCCACCAAGAAGGCCGGCCAGGCCAAGAAGAAGAAGGGCGGCUCCGGCGGCGGCGCCGC |
| sequence | | CUUCAAGCCCAACUCCAUCAACUACAUCCUGGGCCUGGACAUCGGCAUCGCCUCCGUGGGCUGGGCCAUGGUGGAGAUCGACG |
| encoding | | AGGAGGAGAACCCCAUCCGGCUGAUCGACCUGGGCGUGCGGGUGUUCGAGCGGGCCGAGGUGCCCAAGACCGGCGACUCCCUG |
| Nme1Cas9 | | GCCAUGGCCCGGCGGCUGGCCCGGUCCGUGCGGCGGCUGACCCGGCGGCGGGCCCACCGGCUGCUGCGGACCCGGCGGCUGCU |
| with | | GAAGCGGGAGGGCGUGCUGCAGGCCGCCAACUUCGACGAGAACGGCCUGAUCAAGUCCCUGCCCAACACCCCCUGGCAGCUGC |
| HiBiT tag | | GGGCCGCCGCCCUGGACCGGAAGCUGACCCCCCUGGAGUGGUCCGCCGUGCUGCUGCACCUGAUCAAGCACCGGGGCUACCUG |
| | | UCCCAGCGGAAGAACGAGGGCGAGACCGCCGACAAGGAGCUGGGCGCCCUGCUGAAGGGCGUGGCCGGCAACGCCCACGCCCU |
| | | GCAGACCGGCGACUUCCGGACCCCCGCCGAGCUGGCCCUGAACAAGUUCGAGAAGGAGUCCGGCCACAUCCGGAACCAGCGGU |
| | | CCGACUACUCCCACACCUUCUCCCGGAAGGACCUGCAGGCCGAGCUGAUCCUGCUGUUCGAGAAGCAGAAGGAGUUCGGCAAC |
| | | CCCCACGUGUCCGGCGGCCUGAAGGAGGGCAUCGAGACCCUGCUGAUGACCCAGCGGCCCGCCCUGUCCGGCGACGCCGUGCA |
| | | GAAGAUGCUGGGCCACUGCACCUUCGAGCCCGCCGAGCCCAAGGCCGCCAAGAACACCUACACCGCCGAGCGGUUCAUCUGGC |
| | | UGACCAAGCUGAACAACCUGCGGAUCCUGGAGCAGGGCUCCGAGCGGCCCCUGACCGACACCGAGCGGGCCACCCUGAUGGAC |
| | | GAGCCCUACCGGAAGUCCAAGCUGACCUACGCCCAGGCCCGGAAGCUGCUGGGCCUGGAGGACACCGCCUUCUUCAAGGGCCU |
| | | GCGGUACGGCAAGGACAACGCCGAGGCCUCCACCCUGAUGGAGAUGAAGGCCUACCACGCCAUCUCCCGGGCCCUGGAGAAGG |
| | | AGGGCCUGAAGGACAAGAAGUCCCCCCUGAACCUGUCCCCCGAGCUGCAGGACGAGAUCGGCACCGCCUUCUCCCUGUUCAAG |
| | | ACCGACGAGGACAUCACCGGCCGGCUGAAGGACCGGAUCCAGCCCGAGAUCCUGGAGGCCCUGCUGAAGCACAUCUCCUUCGA |
| | | CAAGUUCGUGCAGAUCUCCCUGAAGGCCCUGCGGCGGAUCGUGCCCCUGAUGGAGCAGGGCAAGCGGUACGACGAGGCCUGCG |
| | | CCGAGAUCUACGGCGACCACUACGGCAAGAAGAACACCGAGGAGAAGAUCUACCUGCCCCCCAUCCCCGCCGACGAGAUCCGG |
| | | AACCCCGUGGUGCUGCGGGCCCUGUCCCAGGCCCGGAAGGUGAUCAACGGCGUGGUGCGGCGGUACGGCUCCCCCGCCCGGAU |
| | | CCACAUCGAGACCGCCCGGGAGGUGGGCAAGUCCUUCAAGGACCGGAAGGAGAUCGAGAAGCGGCAGGAGGAGAACCGGAAGG |
| | | ACCGGGAGAAGGCCGCCGCCAAGUUCCGGGAGUACUUCCCCAACUUCGUGGGCGAGCCCAAGUCCAAGGACAUCCUGAAGCUG |
| | | CGGCUGUACGAGCAGCAGCACGGCAAGUGCCUGUACUCCGGCAAGGAGAUCAACCUGGGCCGGCUGAACGAGAAGGGCUACGU |
| | | GGAGAUCGACCACGCCCUGCCCUUCUCCCGGACCUGGGACGACUCCUUCAACAACAAGGUGCUGGUGCUGGGCUCCGAGAACC |
| | | AGAACAAGGGCAACCAGACCCCCUACGAGUACUUCAACGGCAAGGACAACUCCCGGGAGUGGCAGGAGUUCAAGGCCCGGGUG |
| | | GAGACCUCCCGGUUCCCCCGGUCCAAGAAGCAGCGGAUCCUGCUGCAGAAGUUCGACGAGGACGGCUUCAAGGAGCGGAACCU |
| | | GAACGACACCCGGUACGUGAACCGGUUCCUGUGCCAGUUCGUGGCCGACCGGAUGCGGCUGACCGGCAAGGGCAAGAAGCGGG |
| | | UGUUCGCCUCCAACGGCCAGAUCACCAACCUGCUGCGGGGCUUCUGGGGCCUGCGGAAGGUGCGGGCCGAGAACGACCGGCAC |
| | | CACGCCCUGGACGCCGUGGUGGUGGCCUGCUCCACCGUGGCCAUGCAGCAGAAGAUCACCCGGUUCGUGCGGUACAAGGAGAU |
| | | GAACGCCUUCGACGGCAAGACCAUCGACAAGGAGACCGGCGAGGUGCUGCACCAGAAGACCCACUUCCCCCAGCCCUGGGAGU |
| | | UCUUCGCCCAGGAGGUGAUGAUCCGGGUGUUCGGCAAGCCCGACGGCAAGCCCGAGUUCGAGGAGGCCGACACCCUGGAGAAG |
| | | CUGCGGACCCUGCUGGCCGAGAAGCUGUCCUCCCGGCCCGAGGCCGUGCACGAGUACGUGACCCCCCUGUUCGUGUCCCGGGC |
| | | CCCCAACCGGAAGAUGUCCGGCCAGGGCCACAUGGAGACCGUGAAGUCCGCCAAGCGGCUGGACGAGGGCGUGUCCGUGCUGC |
| | | GGGUGCCCCUGACCCAGCUGAAGCUGAAGGACCUGGAGAAGAUGGUGAACCGGGAGCGGGAGCCCAAGCUGUACGAGGCCCUG |
| | | AAGGCCCGGCUGGAGGCCCACAAGGACGACCCCGCCAAGGCCUUCGCCGAGCCCUUCUACAAGUACGACAAGGCCGGCAACCG |
| | | GACCCAGCAGGUGAAGGCCGUGCGGGUGGAGCAGGUGCAGAAGACCGGCGUGUGGGUGCGGAACCACAACGGCAUCGCCGACA |
| | | ACGCCACCAUGGUGCGGGUGGACGUGUUCGAGAAGGGCGACAAGUACUACCUGGUGCCCAUCUACUCCUGGCAGGUGGCCAAG |
| | | GGCAUCCUGCCCGACCGGGCCGUGGUGCAGGGCAAGGACGAGGAGGACUGGCAGCUGAUCGACGACUCCUUCAACUUCAAGUU |
| | | CUCCCUGCACCCCAACGACCUGGUGGAGGUGAUCACCAAGAAGGCCCGGAUGUUCGGCUACUUCGCCUCCUGCCACCGGGGCA |
| | | CCGGCAACAUCAACAUCCGGAUCCACGACCUGGACCACAAGAUCGGCAAGAACGGCAUCCUGGAGGGCAUCGGCGUGAAGACC |
| | | GCCCUGUCCUUCCAGAAGUACCAGAUCGACGAGCUGGGCAAGGAGAUCCGGCCCUGCCGGCUGAAGAAGCGGCCCCCCGUGCG |
| | | GUCCGAGUCCGCCACCCCCGAGUCCGUGUCCGGCUGGCGGCUGUUCAAGAAGAUCUCCUAGCUAGCACCAGCCUCAAGAACAC |
| | | CCGAAUGGAGUCUCUAAGCUACAUAAUACCAACUUACACUUUACAAAAUGUUGUCCCCCAAAAUGUAGCCAUUCGUAUCUGCU |
| | | CCUAAUAAAAAGAAAGUUUCUUCACAUUCUAAAAAAAAAAAAUGGAAAAAAAAAAAACGGAAAAAAAAAAAAGGUAAAAAAAA |
| | | AAAAUAUAAAAAAAAAAAACAUAAAAAAAAAAAACGAAAAAAAAAAAACGUAAAAAAAAAAAACUCAAAAAAAAAAAAGAUAA |
| | | AAAAAAAAAACCUAAAAAAAAAAAAUGUAAAAAAAAAAAAGGGAAAAAAAAAAAACGCAAAAAAAAAAAACACAAAAAAAAAA |
| | | AAUGCAAAAAAAAAAAAUCGAAAAAAAAAAAAUCUAAAAAAAAAAAACGAAAAAAAAAAAACCCAAAAAAAAAAAAGACAAAA |
| | | AAAAAAAAUAGAAAAAAAAAAAAGUUAAAAAAAAAAAACUGAAAAAAAAAAAAUUUAAAAAAAAAAAAUCUCGA |
| Exemplary | 309 | GGGAAGCUCAGAAUAAACGCUCAACUUUGGCCGGAUCUGCCACCAUGGACGGCUCCGGCGGCGGCUCCCCCAAGAAGAAGCGG |
| coding | | AAGGUGGAGGACAAGCGGCCCGCCGCCACCAAGAAGGCCGGCCAGGCCAAGAAGAAGAAGGGCGGCUCCGGCGGCGCCGCCUU |
| sequence | | CAAGCCCAACCCCAUCAACUACAUCCUGGGCCUGGACAUCGGCAUCGCCUCCGUGGGCUGGGCCAUGGUGGAGAUCGACGAGG |
| encoding | | AGGAGAACCCCAUCCGGCUGAUCGACCUGGGCGUGCGGGUGUUCGAGCGGGCCGAGGUGCCCAAGACCGGCGACUCCCUGGCC |
| Nme3Cas9 | | AUGGCCCGGCGGCUGGCCCGGUCCGUGCGGCGGCUGACCCGGCGGCGGGCCCACCGGCUGCUGCGGGCCCGGCGGCUGCUGAA |
| with | | GCGGGAGGGCGUGCUGCAGGCCGCCGACUUCGACGAGAACGGCCUGAUCAAGUCCCUGCCCAACACCCCCUGGCAGCUGCGGG |
| HiBiT tag | | CCGCCGCCCUGGACCGGAAGCUGACCCCCCUGGAGUGGUCCGCCGUGCUGCUGCACCUGAUCAAGCACCGGGGCUACCUGUCC |
| | | CAGCGGAAGAACGAGGGCGAGACCGCCGACAAGGAGCUGGGCGCCCUGCUGAAGGGCGUGGCCGACAACGCCCACGCCCUGCA |
| | | GACCGGCGACUUCCGGACCCCCGCCGAGCUGGCCCUGAACAAGUUCGAGAAGGAGUGCGGCCACAUCCGGAACCAGCGGGGCG |
| | | ACUACUCCCACACCUUCUCCCGGAAGGACCUGCAGGCCGAGCUGAACCUGCUGUUCGAGAAGCAGAAGGAGUUCGGCAACCCC |
| | | CACGUGUCCGGCGGCCUGAAGGAGGGCAUCGAGACCCUGCUGAUGACCCAGCGGCCCGCCCUGUCCGGCGACGCCGUGCAGAA |
| | | GAUGCUGGGCCACUGCACCUUCGAGCCCGCCGAGCCCAAGGCCGCCAAGAACACCUACACCGCCGAGCGGUUCAUCUGGCUGA |
| | | CCAAGCUGAACAACCUGCGGAUCCUGGAGCAGGGCUCCGAGCGGCCCCUGACCGACACCGAGCGGGCCACCCUGAUGGACGAG |
| | | CCCUACCGGAAGUCCAAGCUGACCUACGCCCAGGCCCGGAAGCUGCUGUCCCUGGAGGACACCGCCUUCUUCAAGGGCCUGCG |
| | | GUACGGCAAGGACAACGCCGAGGCCUCCACCCUGAUGGAGAUGAAGGCCUACCACACCAUCUCCCGGGCCCUGGAGAAGGAGG |
| | | GCCUGAAGGACAAGAAGUCCCCCCUGAACCUGUCCCCCGAGCUGCAGGACGAGAUCGGCACCGCCUUCUCCCUGUUCAAGACC |
| | | GACGAGGACAUCACCGGCCGGCUGAAGGACCGGAUCCAGCCCGAGAUCCUGGAGGCCCUGCUGAAGCACAUCUCCUUCGACAA |
| | | GUUCGUGCAGAUCUCCCUGAAGGCCCUGCGGCGGAUCGUGCCCCUGAUGGAGCAGGGCAAGCGGUACGACGAGGCCUGCGCCG |
| | | AGAUCUACGGCGACCACUACGGCAAGAAGAACACCGAGGAGAAGAUCUACCUGCCCCCCAUCCCCGCCGACGAGAUCCGGAAC |
| | | CCCGUGGUGCUGCGGGCCCUGUCCCAGGCCCGGAAGGUGAUCAACGGCGUGGUGCGGCGGUACGGCUCCCCCGCCCGGAUCCA |
| | | CAUCGAGACCGCCCGGGAGGUGGGCAAGUCCUUCAAGGACCGGAAGGAGAUCGAGAAGCGGCAGGAGGAGAACCGGAAGGACC |
| | | GGGAGAAGGCCGCCGCCAAGUUCCGGGAGUACUUCCCCAACUUCGUGGGCGAGCCCAAGUCCAAGGACAUCCUGAAGCUGCGG |
| | | CUGUACGAGCAGCAGCACGGCAAGUGCCUGUACUCCGGCAAGGAGAUCAACCUGGGCCGGCUGAACGAGAAGGGCUACGUGGA |
| | | GAUCGACCACGCCCUGCCCUUCUCCCGGACCUGGGACGACUCCUUCAACAACAAGGUGCUGGUGCUGGGCUCCGAGAACCAGA |
| | | ACAAGGGCAACCAGACCCCCUACGAGUACUUCAACGGCAAGGACAACUCCCGGGAGUGGCAGGAGUUCAAGGCCCGGGUGGAG |
| | | ACCUCCCGGUUCCCCCGGUCCAAGAAGCAGCGGAUCCUGCUGCAGAAGUUCGACGAGGACGGCUUCAAGGAGCGGAACCUGAA |
| | | CGACACCCGGUACGUGAACCGGUUCCUGUGCCAGUUCGUGGCCGACCGGAUGCGGCUGACCGGCAAGGGCAAGAAGCGGGUGU |
| | | UCGCCUCCAACGGCCAGAUCACCAACCUGCUGCGGGGCUUCUGGGGCCUGCGGAAGGUGCGGGCCGAGAACGACCGGCACCAC |
| | | GCCCUGGACGCCGUGGUGGUGGCCUGCUCCACCGUGGCCAUGCAGCAGAAGAUCACCCGGUUCGUGCGGUACAAGGAGAUGAA |
| | | CGCCUUCGACGGCAAGACCAUCGACAAGGAGACCGGCGAGGUGCUGCACCAGAAGACCCACUUCCCCCAGCCCUGGGAGUUCU |
| | | UCGCCCAGGAGGUGAUGAUCCGGGUGUUCGGCAAGCCCGACGGCAAGCCCGAGUUCGAGGAGGCCGACACCCCCGAGAAGCUG |
| | | CGGACCCUGCUGGCCGAGAAGCUGUCCUCCCGGCCCGAGGCCGUGCACGAGUACGUGACCCCCCUGUUCGUGUCCCGGGCCCC |
| | | CAACCGGAAGAUGUCCGGCCAGGGCCACAUGGAGACCGUGAAGUCCGCCAAGCGGCUGGACGAGGGCGUGUCCGUGCUGCGGG |
| | | UGCCCCUGACCCAGCUGAAGCUGAAGGACCUGGAGAAGAUGGUGAACCGGGAGCGGGAGCCCAAGCUGUACGAGGCCCUGAAG |
| | | GCCCGGCUGGAGGCCCACAAGGACGACCCCGCCAAGGCCUUCGCCGAGCCCUUCUACAAGUACGACAAGGCCGGCAACCGGAC |
| | | CCAGCAGGUGAAGGCCGUGCGGGUGGAGCAGGUGCAGAAGACCGGCGUGUGGGUGCGGAACCACAACGGCAUCGCCGACAACG |
| | | CCACCAUGGUGCGGGUGGACGUGUUCGAGAAGGGCGACAAGUACUACCUGGUGCCCAUCUACUCCUGGCAGGUGGCCAAGGGC |
| | | AUCCUGCCCGACCGGGCCGUGGUGGCCUACGCCGACGAGGAGGACUGGACCGUGAUCGACGAGUCCUUCCGGUUCAAGUUCGU |
| | | GCUGUACUCCAACGACCUGAUCAAGGUGCAGCUGAAGAAGGACUCCUUCCUGGGCUACUUCUCCGGCCUGGACCGGGCCACCG |
| | | GCGCCAUCUCCCUGCGGGAGCACGACCUGGAGAAGUCCAAGGGCAAGGACGGCAUGCACCGGAUCGGCGUGAAGACCGCCCUG |
| | | UCCUUCCAGAAGUACCAGAUCGACGAGAUGGGCAAGGAGAUCCGGCCCUGCCGGCUGAAGAAGCGGCCCCCCGUGCGGUCCGA |
| | | GUCCGCCACCCCCGAGUCCGUGUCCGGCUGGCGGCUGUUCAAGAAGAUCUCCUAGCUAGCACCAGCCUCAAGAACACCCGAAU |
| | | GGAGUCUCUAAGCUACAUAAUACCAACUUACACUUUACAAAAUGUUGUCCCCCAAAAUGUAGCCAUUCGUAUCUGCUCCUAAU |
| | | AAAAAGAAAGUUUCUUCACAUUCUCUCGAGAAAAAAAAAAAAUGGAAAAAAAAAAAACGGAAAAAAAAAAAAGGUAAAAAAAA |
| | | AAAAUAUAAAAAAAAAAAACAUAAAAAAAAAAAACGAAAAAAAAAAAACGUAAAAAAAAAAAACUCAAAAAAAAAAAAGAUAA |
| | | AAAAAAAAAACCUAAAAAAAAAAAAUGUAAAAAAAAAAAAGGGAAAAAAAAAAAACGCAAAAAAAAAAAACACAAAAAAAAAA |
| | | AAUGCAAAAAAAAAAAAUCGAAAAAAAAAAAAUCUAAAAAAAAAAAACGAAAAAAAAAAAACCCAAAAAAAAAAAAGACAAAA |
| | | AAAAAAAAUAGAAAAAAAAAAAAGUUAAAAAAAAAAAACUGAAAAAAAAAAAAUUUAAAAAAAAAAAAUCUAG |
| Exemplary | 310 | MDGSGGGSPKKKRKVEDKRPAATKKAGQAKKKKGGSGGGAAFKPNPINYILGLDIGIASVGWAMVEIDEEENPIRLIDLGVRV |
| amino | | FERAEVPKTGDSLAMARRLARSVRRLTRRRAHRLLRARRLLKREGVLQAADEDENGLIKSLPNTPWQLRAAALDRKLTPLEWS |
| acid | | AVLLHLIKHRGYLSQRKNEGETADKELGALLKGVANNAHALQTGDERTPAELALNKFEKESGHIRNQRGDYSHTFSRKDLQAE |
| sequence | | LILLFEKQKEFGNPHVSGGLKEGIETLLMTQRPALSGDAVQKMLGHCTFEPAEPKAAKNTYTAERFIWLTKLNNLRILEQGSE |
| for | | RPLTDTERATLMDEPYRKSKLTYAQARKLLGLEDTAFFKGLRYGKDNAEASTLMEMKAYHAISRALEKEGLKDKKSPLNLSSE |
| Nme2Cas9 | | LQDEIGTAFSLFKTDEDITGRLKDRVQPEILEALLKHISFDKFVQISLKALRRIVPLMEQGKRYDEACAEIYGDHYGKKNTEE |
| | | KIYLPPIPADEIRNPVVLRALSQARKVINGVVRRYGSPARIHIETAREVGKSFKDRKEIEKRQEENRKDREKAAAKFREYFPN |
| | | FVGEPKSKDILKLRLYEQQHGKCLYSGKEINLVRLNEKGYVEIDHALPFSRTWDDSFNNKVLVLGSENQNKGNQTPYEYENGK |
| | | DNSREWQEFKARVETSRFPRSKKQRILLQKFDEDGEKECNLNDTRYVNRFLCQFVADHILLTGKGKRRVFASNGQITNLLRGF |
| | | WGLRKVRAENDRHHALDAVVVACSTVAMQQKITRFVRYKEMNAFDGKTIDKETGKVLHQKTHFPQPWEFFAQEVMIRVFGKPD |
| | | GKPEFEEADTPEKLRTLLAEKLSSRPEAVHEYVTPLFVSRAPNRKMSGAHKDTLRSAKRFVKHNEKISVKRVWLTEIKLADLE |
| | | NMVNYKNGREIELYEALKARLEAYGGNAKQAFDPKDNPFYKKGGQLVKAVRVEKTQESGVLLNKKNAYTIADNGDMVRVDVFC |
| | | KVDKKGKNQYFIVPIYAWQVAENILPDIDCKGYRIDDSYTFCFSLHKYDLIAFQKDEKSKVEFAYYINCDSSNGREYLAWHDK |
| | | GSKEQQFRISTQNLVLIQKYQVNELGKEIRPCRLKKRPPVR* |
| Exemplary | 311 | MAAFKPNSINYILGLDIGIASVGWAMVEIDEEENPIRLIDLGVRVFERAEVPKTGDSLAMARRLARSVRRLTRRRAHRLLRTR |
| amino | | RLLKREGVLQAANFDENGLIKSLPNTPWQLRAAALDRKLTPLEWSAVLLHLIKHRGYLSQRKNEGETADKELGALLKGVAGNA |
| acid | | HALQTGDFRTPAELALNKFEKESGHIRNQRSDYSHTFSRKDLQAELILLFEKQKEFGNPHVSGGLKEGIETLLMTQRPALSGD |
| sequence | | AVQKMLGHCTFEPAEPKAAKNTYTAERFIWLTKLNNLRILEQGSERPLTDTERATLMDEPYRKSKLTYAQARKLLGLEDTAFF |
| for | | KGLRYGKDNAEASTLMEMKAYHAISRALEKEGLKDKKSPLNLSPELQDEIGTAFSLFKTDEDITGRLKDRIQPEILEALLKHI |
| Nme1Cas9 | | SFDKFVQISLKALRRIVPLMEQGKRYDEACAEIYGDHYGKKNTEEKIYLPPIPADEIRNPVVLRALSQARKVINGVVRRYGSP |
| | | ARIHIETAREVGKSFKDRKEIEKRQEENRKDREKAAAKFREYFPNFVGEPKSKDILKLRLYEQQHGKCLYSGKEINLGRLNEK |
| | | GYVEIDHALPFSRTWDDSFNNKVLVLGSENQNKGNQTPYEYENGKDNSREWQEFKARVETSRFPRSKKQRILLQKFDEDGEKE |
| | | RNLNDTRYVNRFLCQFVADRMRLTGKGKKRVFASNGQITNLLRGFWGLRKVRAENDRHHALDAVVVACSTVAMQQKITRFVRY |
| | | KEMNAFDGKTIDKETGEVLHQKTHFPQPWEFFAQEVMIRVFGKPDGKPEFEEADTLEKLRTLLAEKLSSRPEAVHEYVTPLFV |
| | | SRAPNRKMSGQGHMETVKSAKRLDEGVSVLRVPLTQLKLKDLEKMVNREREPKLYEALKARLEAHKDDPAKAFAEPFYKYDKA |
| | | GNRTQQVKAVRVEQVQKTGVWVRNHNGIADNATMVRVDVFEKGDKYYLVPIYSWQVAKGILPDRAVVQGKDEEDWQLIDDSFN |
| | | FKFSLHPNDLVEVITKKARMFGYFASCHRGTGNINIRIHDLDHKIGKNGILEGIGVKTALSFQKYQIDELGKEIRPCRLKKRP |
| | | PVRSGKRTADGSEFESPKKKRKVE* |
| Exemplary | 312 | MDGSGGGSPKKKRKVEDKRPAATKKAGQAKKKKGGSGGGAAFKPNPINYILGLDIGIASVGWAMVEIDEEENPIRLIDLGVRV |
| amino | | FERAEVPKTGDSLAMARRLARSVRRLTRRRAHRLLRARRLLKREGVLQAADEDENGLIKSLPNTPWQLRAAALDRKLTPLEWS |
| acid | | AVLLHLIKHRGYLSQRKNEGETADKELGALLKGVANNAHALQTGDERTPAELALNKFEKESGHIRNQRGDYSHTFSRKDLQAE |
| sequence | | LILLFEKQKEFGNPHVSGGLKEGIETLLMTQRPALSGDAVQKMLGHCTFEPAEPKAAKNTYTAERFIWLTKLNNLRILEQGSE |
| for | | RPLTDTERATLMDEPYRKSKLTYAQARKLLGLEDTAFFKGLRYGKDNAEASTLMEMKAYHAISRALEKEGLKDKKSPLNLSSE |
| Nme2Cas9 | | LQDEIGTAFSLEKTDEDITGRLKDRVQPEILEALLKHISFDKFVQISLKALRRIVPLMEQGKRYDEACAEIYGDHYGKKNTEE |
| with | | KIYLPPIPADEIRNPVVLRALSQARKVINGVVRRYGSPARIHIETAREVGKSFKDRKEIEKRQEENRKDREKAAAKFREYFPN |
| HiBiT tag | | FVGEPKSKDILKLRLYEQQHGKCLYSGKEINLVRLNEKGYVEIDHALPFSRTWDDSFNNKVLVLGSENQNKGNQTPYEYENGK |
| | | DNSREWQEFKARVETSRFPRSKKQRILLQKFDEDGFKECNLNDTRYVNRFLCQFVADHILLTGKGKRRVFASNGQITNLLRGE |
| | | WGLRKVRAENDRHHALDAVVVACSTVAMQQKITRFVRYKEMNAFDGKTIDKETGKVLHQKTHFPQPWEFFAQEVMIRVFGKPD |
| | | GKPEFEEADTPEKLRTLLAEKLSSRPEAVHEYVTPLFVSRAPNRKMSGAHKDTLRSAKRFVKHNEKISVKRVWLTEIKLADLE |
| | | NMVNYKNGREIELYEALKARLEAYGGNAKQAFDPKDNPFYKKGGQLVKAVRVEKTQESGVLLNKKNAYTIADNGDMVRVDVFC |
| | | KVDKKGKNQYFIVPIYAWQVAENILPDIDCKGYRIDDSYTFCFSLHKYDLIAFQKDEKSKVEFAYYINCDSSNGRFYLAWHDK |
| | | GSKEQQFRISTQNLVLIQKYQVNELGKEIRPCRLKKRPPVRSESATPESVSGWRLFKKIS* |
| Exemplary | 313 | MDGSGGGSPKKKRKVEDKRPAATKKAGQAKKKKGGSGGGAAFKPNSINYILGLDIGIASVGWAMVEIDEEENPIRLIDLGVRV |
| amino | | FERAEVPKTGDSLAMARRLARSVRRLTRRRAHRLLRTRRLLKREGVLQAANEDENGLIKSLPNTPWQLRAAALDRKLTPLEWS |
| acid | | AVLLHLIKHRGYLSQRKNEGETADKELGALLKGVAGNAHALQTGDFRTPAELALNKFEKESGHIRNQRSDYSHTESRKDLQAE |
| sequence | | LILLFEKQKEFGNPHVSGGLKEGIETLLMTQRPALSGDAVQKMLGHCTFEPAEPKAAKNTYTAERFIWLTKLNNLRILEQGSE |
| for | | RPLTDTERATLMDEPYRKSKLTYAQARKLLGLEDTAFFKGLRYGKDNAEASTLMEMKAYHAISRALEKEGLKDKKSPLNLSPE |
| Nme1Cas9 | | LQDEIGTAFSLFKTDEDITGRLKDRIQPEILEALLKHISFDKFVQISLKALRRIVPLMEQGKRYDEACAEIYGDHYGKKNTEE |
| with | | KIYLPPIPADEIRNPVVLRALSQARKVINGVVRRYGSPARIHIETAREVGKSFKDRKEIEKRQEENRKDREKAAAKFREYFPN |
| HiBiT tag | | FVGEPKSKDILKLRLYEQQHGKCLYSGKEINLGRLNEKGYVEIDHALPFSRTWDDSFNNKVLVLGSENQNKGNQTPYEYENGK |
| | | DNSREWQEFKARVETSRFPRSKKQRILLQKFDEDGEKERNLNDTRYVNRFLCQFVADRMRLTGKGKKRVFASNGQITNLLRGE |
| | | WGLRKVRAENDRHHALDAVVVACSTVAMQQKITRFVRYKEMNAFDGKTIDKETGEVLHQKTHFPQPWEFFAQEVMIRVFGKPD |
| | | GKPEFEEADTLEKLRTLLAEKLSSRPEAVHEYVTPLFVSRAPNRKMSGQGHMETVKSAKRLDEGVSVLRVPLTQLKLKDLEKM |
| | | VNREREPKLYEALKARLEAHKDDPAKAFAEPFYKYDKAGNRTQQVKAVRVEQVQKTGVWVRNHNGIADNATMVRVDVFEKGDK |
| | | YYLVPIYSWQVAKGILPDRAVVQGKDEEDWQLIDDSFNFKESLHPNDLVEVITKKARMEGYFASCHRGTGNINIRIHDLDHKI |
| | | GKNGILEGIGVKTALSFQKYQIDELGKEIRPCRLKKRPPVRSESATPESVSGWRLFKKIS* |
| Exemplary | 314 | MDGSGGGSPKKKRKVEDKRPAATKKAGQAKKKKGGSGGGAAFKPNSINYILGLDIGIASVGWAMVEIDEEENPIRLIDLGVRV |
| amino | | FERAEVPKTGDSLAMARRLARSVRRLTRRRAHRLLRTRRLLKREGVLQAANEDENGLIKSLPNTPWQLRAAALDRKLTPLEWS |
| acid | | AVLLHLIKHRGYLSQRKNEGETADKELGALLKGVAGNAHALQTGDFRTPAELALNKFEKESGHIRNQRSDYSHTFSRKDLQAE |
| sequence | | LILLFEKQKEFGNPHVSGGLKEGIETLLMTQRPALSGDAVQKMLGHCTFEPAEPKAAKNTYTAERFIWLTKLNNLRILEQGSE |
| for | | RPLTDTERATLMDEPYRKSKLTYAQARKLLGLEDTAFFKGLRYGKDNAEASTLMEMKAYHAISRALEKEGLKDKKSPLNLSPE |
| Nme1Cas 9 | | LQDEIGTAFSLFKTDEDITGRLKDRIQPEILEALLKHISFDKFVQISLKALRRIVPLMEQGKRYDEACAEIYGDHYGKKNTEE |
| with | | KIYLPPIPADEIRNPVVLRALSQARKVINGVVRRYGSPARIHIETAREVGKSFKDRKEIEKRQEENRKDREKAAAKFREYFPN |
| HiBiT tag | | FVGEPKSKDILKLRLYEQQHGKCLYSGKEINLGRLNEKGYVEIDHALPFSRTWDDSFNNKVLVLGSENQNKGNQTPYEYENGK |
| | | DNSREWQEFKARVETSRFPRSKKQRILLQKEDEDGFKERNLNDTRYVNRFLCQFVADRMRLTGKGKKRVFASNGQITNLLRGF |
| | | WGLRKVRAENDRHHALDAVVVACSTVAMQQKITRFVRYKEMNAFDGKTIDKETGEVLHQKTHFPQPWEFFAQEVMIRVFGKPD |
| | | GKPEFEEADTLEKLRTLLAEKLSSRPEAVHEYVTPLFVSRAPNRKMSGQGHMETVKSAKRLDEGVSVLRVPLTQLKLKDLEKM |
| | | VNREREPKLYEALKARLEAHKDDPAKAFAEPFYKYDKAGNRTQQVKAVRVEQVQKTGVWVRNHNGIADNATMVRVDVFEKGDK |
| | | YYLVPIYSWQVAKGILPDRAVVQGKDEEDWQLIDDSFNFKFSLHPNDLVEVITKKARMFGYFASCHRGTGNINIRIHDLDHKI |
| | | GKNGILEGIGVKTALSFQKYQIDELGKEIRPCRLKKRPPVRSESATPESVSGWRLFKKIS* |
| Exemplary | 315 | MDGSGGGSPKKKRKVEDKRPAATKKAGQAKKKKGGSGGAAFKPNPINYILGLDIGIASVGWAMVEIDEEENPIRLIDLGVRVE |
| amino | | ERAEVPKTGDSLAMARRLARSVRRLTRRRAHRLLRARRLLKREGVLQAADFDENGLIKSLPNTPWQLRAAALDRKLTPLEWSA |
| acid | | VLLHLIKHRGYLSQRKNEGETADKELGALLKGVADNAHALQTGDERTPAELALNKFEKECGHIRNQRGDYSHTFSRKDLQAEL |
| sequence | | NLLFEKQKEFGNPHVSGGLKEGIETLLMTQRPALSGDAVQKMLGHCTFEPAEPKAAKNTYTAERFIWLTKLNNLRILEQGSER |
| for | | PLTDTERATLMDEPYRKSKLTYAQARKLLSLEDTAFFKGLRYGKDNAEASTLMEMKAYHTISRALEKEGLKDKKSPLNLSPEL |
| Nme3Cas9 | | QDEIGTAFSLEKTDEDITGRLKDRIQPEILEALLKHISFDKFVQISLKALRRIVPLMEQGKRYDEACAEIYGDHYGKKNTEEK |
| with | | IYLPPIPADEIRNPVVLRALSQARKVINGVVRRYGSPARIHIETAREVGKSFKDRKEIEKRQEENRKDREKAAAKFREYFPNF |
| HiBiT tag | | VGEPKSKDILKLRLYEQQHGKCLYSGKEINLGRLNEKGYVEIDHALPFSRTWDDSFNNKVLVLGSENQNKGNQTPYEYENGKD |
| | | NSREWQEFKARVETSRFPRSKKQRILLQKFDEDGFKERNLNDTRYVNRFLCQFVADRMRLTGKGKKRVFASNGQITNLLRGFW |
| | | GLRKVRAENDRHHALDAVVVACSTVAMQQKITRFVRYKEMNAFDGKTIDKETGEVLHQKTHFPQPWEFFAQEVMIRVFGKPDG |
| | | KPEFEEADTPEKLRTLLAEKLSSRPEAVHEYVTPLFVSRAPNRKMSGQGHMETVKSAKRLDEGVSVLRVPLTQLKLKDLEKMV |
| | | NREREPKLYEALKARLEAHKDDPAKAFAEPFYKYDKAGNRTQQVKAVRVEQVQKTGVWVRNHNGIADNATMVRVDVFEKGDKY |
| | | YLVPIYSWQVAKGILPDRAVVAYADEEDWTVIDESFRFKFVLYSNDLIKVQLKKDSFLGYESGLDRATGAISLREHDLEKSKG |
| | | KDGMHRIGVKTALSFQKYQIDEMGKEIRPCRLKKRPPVRSESATPESVSGWRLFKKIS* |
| Exemplary | 316 | augGACGGCUCCGGCGGCGGCUCCCCCAAGAAGAAGCGGAAGGUGGAGGACAAGCGGCCCGCCGCCACCAAGAAGGCCGGCCA |
| open | | GGCCAAGAAGAAGAAGGGCGGCUCCGGCGGCGGCgccgccuucaagcccaaccccaucaacuacauccugggccuggacaucg |
| reading | | gcaucgccuccgugggcugggccaugguggagaucgacgaggaggagaaccccauccggcugaucgaccugggcgugcgggug |
| frame for | | uucgagcgggccgaggugcccaagaccggcgacucccuggccauggcccggcggcuggcccgguccgugcggcggcugacccg |
| Nme2Cas9 | | gcggcgggcccaccggcugcugcgggcccggcggcugcugaagcgggagggcgugcugcaggccgccgacuucgacgagaacg |
| | | gccugaucaagucccugcccaacacccccuggcagcugcgggccgccgcccuggaccggaagcugaccccccuggaguggucc |
| | | gccgugcugcugcaccugaucaagcaccggggcuaccugucccagcggaagaacgagggcgagaccgccgacaaggagcuggg |
| | | cgcccugcugaagggcguggccaacaacgcccacgcccugcagaccggcgacuuccggacccccgccgagcuggcccugaaca |
| | | aguucgagaaggaguccggccacauccggaaccagcggggcgacuacucccacaccuucucccggaaggaccugcaggccgag |
| | | cugauccugcuguucgagaagcagaaggaguucggcaacccccacguguccggcggccugaaggagggcaucgagacccugcu |
| | | gaugacccagcggcccgcccuguccggcgacgccgugcagaagaugcugggccacugcaccuucgagcccgccgagcccaagg |
| | | ccgccaagaacaccuacaccgccgagcgguucaucuggcugaccaagcugaacaaccugcggauccuggagcagggcuccgag |
| | | cggccccugaccgacaccgagcgggccacccugauggacgagcccuaccggaaguccaagcugaccuacgcccaggcccggaa |
| | | gcugcugggccuggaggacaccgccuucuucaagggccugcgguacggcaaggacaacgccgaggccuccacccugauggaga |
| | | ugaaggccuaccacgccaucucccgggcccuggagaaggagggccugaaggacaagaaguccccccugaaccuguccuccgag |
| | | cugcaggacgagaucggcaccgccuucucccuguucaagaccgacgaggacaucaccggccggcugaaggaccgggugcagcc |
| | | cgagauccuggaggcccugcugaagcacaucuccuucgacaaguucgugcagaucucccugaaggcccugcggcggaucgugc |
| | | cccugauggagcagggcaagcgguacgacgaggccugcgccgagaucuacggcgaccacuacggcaagaagaacaccgaggag |
| | | aagaucuaccugccccccauccccgccgacgagauccggaaccccguggugcugcgggcccugucccaggcccggaaggugau |
| | | caacggcguggugcggcgguacggcucccccgcccggauccacaucgagaccgcccgggaggugggcaaguccuucaaggacc |
| | | ggaaggagaucgagaagcggcaggaggagaaccggaaggaccgggagaaggccgccgccaaguuccgggaguacuuccccaac |
| | | uucgugggcgagcccaaguccaaggacauccugaagcugcggcuguacgagcagcagcacggcaagugccuguacuccggcaa |
| | | ggagaucaaccuggugcggcugaacgagaagggcuacguggagaucgaccacgcccugcccuucucccggaccugggacgacu |
| | | ccuucaacaacaaggugcuggugcugggcuccgagaaccagaacaagggcaaccagacccccuacgaguacuucaacggcaag |
| | | gacaacucccgggaguggcaggaguucaaggcccggguggagaccucccgguucccccgguccaagaagcagcggauccugcu |
| | | gcagaaguucgacgaggacggcuucaaggagugcaaccugaacgacacccgguacgugaaccgguuccugugccaguucgugg |
| | | ccgaccacauccugcugaccggcaagggcaagcggcggguguucgccuccaacggccagaucaccaaccugcugcggggcuuc |
| | | uggggccugcggaaggugcgggccgagaacgaccggcaccacgcccuggacgccguggugguggccugcuccaccguggccau |
| | | gcagcagaagaucacccgguucgugcgguacaaggagaugaacgccuucgacggcaagaccaucgacaaggagaccggcaagg |
| | | ugcugcaccagaagacccacuucccccagcccugggaguucuucgcccaggaggugaugauccggguguucggcaagcccgac |
| | | ggcaagcccgaguucgaggaggccgacacccccgagaagcugcggacccugcuggccgagaagcuguccucccggcccgaggc |
| | | cgugcacgaguacgugaccccccuguucgugucccgggcccccaaccggaagauguccggcgcccacaaggacacccugcggu |
| | | ccgccaagcgguucgugaagcacaacgagaagaucuccgugaagcggguguggcugaccgagaucaagcuggccgaccuggag |
| | | aacauggugaacuacaagaacggccgggagaucgagcuguacgaggcccugaaggcccggcuggaggccuacggcggcaacgc |
| | | caagcaggccuucgaccccaaggacaaccccuucuacaagaagggcggccagcuggugaaggccgugcggguggagaagaccc |
| | | aggaguccggcgugcugcugaacaagaagaacgccuacaccaucgccgacaacggcgacauggugcggguggacguguucugc |
| | | aagguggacaagaagggcaagaaccaguacuucaucgugcccaucuacgccuggcagguggccgagaacauccugcccgacau |
| | | cgacugcaagggcuaccggaucgacgacuccuacaccuucugcuucucccugcacaaguacgaccugaucgccuuccagaagg |
| | | acgagaaguccaagguggaguucgccuacuacaucaacugcgacuccuccaacggccgguucuaccuggccuggcacgacaag |
| | | ggcuccaaggagcagcaguuccggaucuccacccagaaccuggugcugauccagaaguaccaggugaacgagcugggcaagga |
| | | gauccggcccugccggcugaagaagcggccccccgugcgguag |
| Exemplary | 317 | AUGGCAGCAUUCAAGCCGAACUCGAUCAACUACAUCCUGGGACUGGACAUCGGAAUCGCAUCGGUCGGAUGGGCAAUGGUCGA |
| open | | AAUCGACGAAGAAGAAAACCCGAUCAGACUGAUCGACCUGGGAGUCAGAGUCUUCGAAAGAGCAGAAGUCCCGAAGACAGGAG |
| reading | | ACUCGCUGGCAAUGGCAAGAAGACUGGCAAGAUCGGUCAGAAGACUGACAAGAAGAAGAGCACACAGACUGCUGAGAACAAGA |
| frame for | | AGACUGCUGAAGAGAGAAGGAGUCCUGCAGGCAGCAAACUUCGACGAAAACGGACUGAUCAAGUCGCUGCCGAACACACCGUG |
| Nme1Cas9 | | GCAGCUGAGAGCAGCAGCACUGGACAGAAAGCUGACACCGCUGGAAUGGUCGGCAGUCCUGCUGCACCUGAUCAAGCACAGAG |
| | | GAUACCUGUCGCAGAGAAAGAACGAAGGAGAAACAGCAGACAAGGAACUGGGAGCACUGCUGAAGGGAGUCGCAGGAAACGCA |
| | | CACGCACUGCAGACAGGAGACUUCAGAACACCGGCAGAACUGGCACUGAACAAGUUCGAAAAGGAAUCGGGACACAUCAGAAA |
| | | CCAGAGAUCGGACUACUCGCACACAUUCUCGAGAAAGGACCUGCAGGCAGAACUGAUCCUGCUGUUCGAAAAGCAGAAGGAAU |
| | | UCGGAAACCCGCACGUCUCGGGAGGACUGAAGGAAGGAAUCGAAACACUGCUGAUGACACAGAGACCGGCACUGUCGGGAGAC |
| | | GCAGUCCAGAAGAUGCUGGGACACUGCACAUUCGAACCGGCAGAACCGAAGGCAGCAAAGAACACAUACACAGCAGAAAGAUU |
| | | CAUCUGGCUGACAAAGCUGAACAACCUGAGAAUCCUGGAACAGGGAUCGGAAAGACCGCUGACAGACACAGAAAGAGCAACAC |
| | | UGAUGGACGAACCGUACAGAAAGUCGAAGCUGACAUACGCACAGGCAAGAAAGCUGCUGGGACUGGAAGACACAGCAUUCUUC |
| | | AAGGGACUGAGAUACGGAAAGGACAACGCAGAAGCAUCGACACUGAUGGAAAUGAAGGCAUACCACGCAAUCUCGAGAGCACU |
| | | GGAAAAGGAAGGACUGAAGGACAAGAAGUCGCCGCUGAACCUGUCGCCGGAACUGCAGGACGAAAUCGGAACAGCAUUCUCGC |
| | | UGUUCAAGACAGACGAAGACAUCACAGGAAGACUGAAGGACAGAAUCCAGCCGGAAAUCCUGGAAGCACUGCUGAAGCACAUC |
| | | UCGUUCGACAAGUUCGUCCAGAUCUCGCUGAAGGCACUGAGAAGAAUCGUCCCGCUGAUGGAACAGGGAAAGAGAUACGACGA |
| | | AGCAUGCGCAGAAAUCUACGGAGACCACUACGGAAAGAAGAACACAGAAGAAAAGAUCUACCUGCCGCCGAUCCCGGCAGACG |
| | | AAAUCAGAAACCCGGUCGUCCUGAGAGCACUGUCGCAGGCAAGAAAGGUCAUCAACGGAGUCGUCAGAAGAUACGGAUCGCCG |
| | | GCAAGAAUCCACAUCGAAACAGCAAGAGAAGUCGGAAAGUCGUUCAAGGACAGAAAGGAAAUCGAAAAGAGACAGGAAGAAAA |
| | | CAGAAAGGACAGAGAAAAGGCAGCAGCAAAGUUCAGAGAAUACUUCCCGAACUUCGUCGGAGAACCGAAGUCGAAGGACAUCC |
| | | UGAAGCUGAGACUGUACGAACAGCAGCACGGAAAGUGCCUGUACUCGGGAAAGGAAAUCAACCUGGGAAGACUGAACGAAAAG |
| | | GGAUACGUCGAAAUCGACCACGCACUGCCGUUCUCGAGAACAUGGGACGACUCGUUCAACAACAAGGUCCUGGUCCUGGGAUC |
| | | GGAAAACCAGAACAAGGGAAACCAGACACCGUACGAAUACUUCAACGGAAAGGACAACUCGAGAGAAUGGCAGGAAUUCAAGG |
| | | CAAGAGUCGAAACAUCGAGAUUCCCGAGAUCGAAGAAGCAGAGAAUCCUGCUGCAGAAGUUCGACGAAGACGGAUUCAAGGAA |
| | | AGAAACCUGAACGACACAAGAUACGUCAACAGAUUCCUGUGCCAGUUCGUCGCAGACAGAAUGAGACUGACAGGAAAGGGAAA |
| | | GAAGAGAGUCUUCGCAUCGAACGGACAGAUCACAAACCUGCUGAGAGGAUUCUGGGGACUGAGAAAGGUCAGAGCAGAAAACG |
| | | ACAGACACCACGCACUGGACGCAGUCGUCGUCGCAUGCUCGACAGUCGCAAUGCAGCAGAAGAUCACAAGAUUCGUCAGAUAC |
| | | AAGGAAAUGAACGCAUUCGACGGAAAGACAAUCGACAAGGAAACAGGAGAAGUCCUGCACCAGAAGACACACUUCCCGCAGCC |
| | | GUGGGAAUUCUUCGCACAGGAAGUCAUGAUCAGAGUCUUCGGAAAGCCGGACGGAAAGCCGGAAUUCGAAGAAGCAGACACAC |
| | | UGGAAAAGCUGAGAACACUGCUGGCAGAAAAGCUGUCGUCGAGACCGGAAGCAGUCCACGAAUACGUCACACCGCUGUUCGUC |
| | | UCGAGAGCACCGAACAGAAAGAUGUCGGGACAGGGACACAUGGAAACAGUCAAGUCGGCAAAGAGACUGGACGAAGGAGUCUC |
| | | GGUCCUGAGAGUCCCGCUGACACAGCUGAAGCUGAAGGACCUGGAAAAGAUGGUCAACAGAGAAAGAGAACCGAAGCUGUACG |
| | | AAGCACUGAAGGCAAGACUGGAAGCACACAAGGACGACCCGGCAAAGGCAUUCGCAGAACCGUUCUACAAGUACGACAAGGCA |
| | | GGAAACAGAACACAGCAGGUCAAGGCAGUCAGAGUCGAACAGGUCCAGAAGACAGGAGUCUGGGUCAGAAACCACAACGGAAU |
| | | CGCAGACAACGCAACAAUGGUCAGAGUAGACGUCUUCGAAAAGGGAGACAAGUACUACCUGGUCCCGAUCUACUCGUGGCAGG |
| | | UCGCAAAGGGAAUCCUGCCGGACAGAGCAGUCGUCCAGGGAAAGGACGAAGAAGACUGGCAGCUGAUCGACGACUCGUUCAAC |
| | | UUCAAGUUCUCGCUGCACCCGAACGACCUGGUCGAAGUCAUCACAAAGAAGGCAAGAAUGUUCGGAUACUUCGCAUCGUGCCA |
| | | CAGAGGAACAGGAAACAUCAACAUCAGAAUCCACGACCUGGACCACAAGAUCGGAAAGAACGGAAUCCUGGAAGGAAUCGGAG |
| | | UCAAGACAGCACUGUCGUUCCAGAAGUACCAGAUCGACGAACUGGGAAAGGAAAUCAGACCGUGCAGACUGAAGAAGAGACCG |
| | | CCGGUCAGAUCCGGAAAGAGAACAGCAGACGGAUCGGAAUUCGAAUCGCCGAAGAAGAAGAGAAAGGUCGAAUGA |
| Exemplary | 318 | augGACGGCUCCGGCGGCGGCUCCCCCAAGAAGAAGCGGAAGGUGGAGGACAAGCGGCCCGCCGCCACCAAGAAGGCCGGCCA |
| open | | GGCCAAGAAGAAGAAGGGCGGCUCCGGCGGCGGCGCCGCCUUCAAGCCCAACCCCAUCAACUACAUCCUGGGCCUGGACAUCG |
| reading | | GCAUCGCCUCCGUGGGCUGGGCCAUGGUGGAGAUCGACGAGGAGGAGAACCCCAUCCGGCUGAUCGACCUGGGCGUGCGGGUG |
| frame for | | UUCGAGCGGGCCGAGGUGCCCAAGACCGGCGACUCCCUGGCCAUGGCCCGGCGGCUGGCCCGGUCCGUGCGGCGGCUGACCCG |
| Nme2Cas9 | | GCGGCGGGCCCACCGGCUGCUGCGGGCCCGGCGGCUGCUGAAGCGGGAGGGCGUGCUGCAGGCCGCCGACUUCGACGAGAACG |
| with | | GCCUGAUCAAGUCCCUGCCCAACACCCCCUGGCAGCUGCGGGCCGCCGCCCUGGACCGGAAGCUGACCCCCCUGGAGUGGUCC |
| HiBiT tag | | GCCGUGCUGCUGCACCUGAUCAAGCACCGGGGCUACCUGUCCCAGCGGAAGAACGAGGGCGAGACCGCCGACAAGGAGCUGGG |
| | | CGCCCUGCUGAAGGGCGUGGCCAACAACGCCCACGCCCUGCAGACCGGCGACUUCCGGACCCCCGCCGAGCUGGCCCUGAACA |
| | | AGUUCGAGAAGGAGUCCGGCCACAUCCGGAACCAGCGGGGCGACUACUCCCACACCUUCUCCCGGAAGGACCUGCAGGCCGAG |
| | | CUGAUCCUGCUGUUCGAGAAGCAGAAGGAGUUCGGCAACCCCCACGUGUCCGGCGGCCUGAAGGAGGGCAUCGAGACCCUGCU |
| | | GAUGACCCAGCGGCCCGCCCUGUCCGGCGACGCCGUGCAGAAGAUGCUGGGCCACUGCACCUUCGAGCCCGCCGAGCCCAAGG |
| | | CCGCCAAGAACACCUACACCGCCGAGCGGUUCAUCUGGCUGACCAAGCUGAACAACCUGCGGAUCCUGGAGCAGGGCUCCGAG |
| | | CGGCCCCUGACCGACACCGAGCGGGCCACCCUGAUGGACGAGCCCUACCGGAAGUCCAAGCUGACCUACGCCCAGGCCCGGAA |
| | | GCUGCUGGGCCUGGAGGACACCGCCUUCUUCAAGGGCCUGCGGUACGGCAAGGACAACGCCGAGGCCUCCACCCUGAUGGAGA |
| | | UGAAGGCCUACCACGCCAUCUCCCGGGCCCUGGAGAAGGAGGGCCUGAAGGACAAGAAGUCCCCCCUGAACCUGUCCUCCGAG |
| | | CUGCAGGACGAGAUCGGCACCGCCUUCUCCCUGUUCAAGACCGACGAGGACAUCACCGGCCGGCUGAAGGACCGGGUGCAGCC |
| | | CGAGAUCCUGGAGGCCCUGCUGAAGCACAUCUCCUUCGACAAGUUCGUGCAGAUCUCCCUGAAGGCCCUGCGGCGGAUCGUGC |
| | | CCCUGAUGGAGCAGGGCAAGCGGUACGACGAGGCCUGCGCCGAGAUCUACGGCGACCACUACGGCAAGAAGAACACCGAGGAG |
| | | AAGAUCUACCUGCCCCCCAUCCCCGCCGACGAGAUCCGGAACCCCGUGGUGCUGCGGGCCCUGUCCCAGGCCCGGAAGGUGAU |
| | | CAACGGCGUGGUGCGGCGGUACGGCUCCCCCGCCCGGAUCCACAUCGAGACCGCCCGGGAGGUGGGCAAGUCCUUCAAGGACC |
| | | GGAAGGAGAUCGAGAAGCGGCAGGAGGAGAACCGGAAGGACCGGGAGAAGGCCGCCGCCAAGUUCCGGGAGUACUUCCCCAAC |
| | | UUCGUGGGCGAGCCCAAGUCCAAGGACAUCCUGAAGCUGCGGCUGUACGAGCAGCAGCACGGCAAGUGCCUGUACUCCGGCAA |
| | | GGAGAUCAACCUGGUGCGGCUGAACGAGAAGGGCUACGUGGAGAUCGACCACGCCCUGCCCUUCUCCCGGACCUGGGACGACU |
| | | CCUUCAACAACAAGGUGCUGGUGCUGGGCUCCGAGAACCAGAACAAGGGCAACCAGACCCCCUACGAGUACUUCAACGGCAAG |
| | | GACAACUCCCGGGAGUGGCAGGAGUUCAAGGCCCGGGUGGAGACCUCCCGGUUCCCCCGGUCCAAGAAGCAGCGGAUCCUGCU |
| | | GCAGAAGUUCGACGAGGACGGCUUCAAGGAGUGCAACCUGAACGACACCCGGUACGUGAACCGGUUCCUGUGCCAGUUCGUGG |
| | | CCGACCACAUCCUGCUGACCGGCAAGGGCAAGCGGCGGGUGUUCGCCUCCAACGGCCAGAUCACCAACCUGCUGCGGGGCUUC |
| | | UGGGGCCUGCGGAAGGUGCGGGCCGAGAACGACCGGCACCACGCCCUGGACGCCGUGGUGGUGGCCUGCUCCACCGUGGCCAU |
| | | GCAGCAGAAGAUCACCCGGUUCGUGCGGUACAAGGAGAUGAACGCCUUCGACGGCAAGACCAUCGACAAGGAGACCGGCAAGG |
| | | UGCUGCACCAGAAGACCCACUUCCCCCAGCCCUGGGAGUUCUUCGCCCAGGAGGUGAUGAUCCGGGUGUUCGGCAAGCCCGAC |
| | | GGCAAGCCCGAGUUCGAGGAGGCCGACACCCCCGAGAAGCUGCGGACCCUGCUGGCCGAGAAGCUGUCCUCCCGGCCCGAGGC |
| | | CGUGCACGAGUACGUGACCCCCCUGUUCGUGUCCCGGGCCCCCAACCGGAAGAUGUCCGGCGCCCACAAGGACACCCUGCGGU |
| | | CCGCCAAGCGGUUCGUGAAGCACAACGAGAAGAUCUCCGUGAAGCGGGUGUGGCUGACCGAGAUCAAGCUGGCCGACCUGGAG |
| | | AACAUGGUGAACUACAAGAACGGCCGGGAGAUCGAGCUGUACGAGGCCCUGAAGGCCCGGCUGGAGGCCUACGGCGGCAACGC |
| | | CAAGCAGGCCUUCGACCCCAAGGACAACCCCUUCUACAAGAAGGGCGGCCAGCUGGUGAAGGCCGUGCGGGUGGAGAAGACCC |
| | | AGGAGUCCGGCGUGCUGCUGAACAAGAAGAACGCCUACACCAUCGCCGACAACGGCGACAUGGUGCGGGUGGACGUGUUCUGC |
| | | AAGGUGGACAAGAAGGGCAAGAACCAGUACUUCAUCGUGCCCAUCUACGCCUGGCAGGUGGCCGAGAACAUCCUGCCCGACAU |
| | | CGACUGCAAGGGCUACCGGAUCGACGACUCCUACACCUUCUGCUUCUCCCUGCACAAGUACGACCUGAUCGCCUUCCAGAAGG |
| | | ACGAGAAGUCCAAGGUGGAGUUCGCCUACUACAUCAACUGCGACUCCUCCAACGGCCGGUUCUACCUGGCCUGGCACGACAAG |
| | | GGCUCCAAGGAGCAGCAGUUCCGGAUCUCCACCCAGAACCUGGUGCUGAUCCAGAAGUACCAGGUGAACGAGCUGGGCAAGGA |
| | | GAUCCGGCCCUGCCGGCUGAAGAAGCGGCCCCCCGUGCGGUCCGAGUCCGCCACCCCCGAGUCCGUGUCCGGCUGGCGGCUGU |
| | | UCAAGAAGAUCUCCUAG |
| Exemplary | 319 | augGACGGCUCCGGCGGCGGCUCCCCCAAGAAGAAGCGGAAGGUGGAGGACAAGCGGCCCGCCGCCACCAAGAAGGCCGGCCA |
| open | | GGCCAAGAAGAAGAAGGGCGGCUCCGGCGGCGGCGCAGCAUUCAAGCCAAACUCAAUCAAUUACAUCCUGGGACUGGACAUCG |
| reading | | GCAUCGCAUCCGUCGGGUGGGCUAUGGUCGAAAUCGACGAGGAGGAGAACCCCAUCCGCCUGAUCGAUCUGGGCGUGCGCGUG |
| frame for | | UUUGAGAGGGCAGAGGUGCCUAAGACCGGCGACAGCCUGGCCAUGGCACGGAGACUGGCACGCUCCGUGAGGCGCCUGACCCG |
| Nme1Cas9 | | GAGAAGGGCCCACAGACUGCUGAGGACACGCCGGCUGCUGAAGAGGGAGGGCGUGCUGCAGGCCGCCAACUUCGAUGAGAAUG |
| with | | GCCUGAUCAAGUCCCUGCCCAAUACCCCUUGGCAGCUGAGGGCAGCCGCCCUGGACCGCAAGCUGACACCUCUGGAGUGGUCC |
| HiBiT tag | | GCCGUGCUGCUGCACCUGAUCAAGCACCGGGGCUACCUGUCUCAGAGAAAGAACGAGGGCGAGACAGCCGAUAAGGAGCUGGG |
| | | CGCCCUGCUGAAGGGAGUGGCAGGAAAUGCACACGCCCUGCAGACCGGCGACUUUCGCACACCAGCCGAGCUGGCCCUGAACA |
| | | AGUUCGAGAAGGAGAGCGGCCACAUCCGCAAUCAGCGGUCUGACUAUAGCCACACCUUCUCCCGGAAGGAUCUGCAGGCCGAG |
| | | CUGAUCCUGCUGUUUGAGAAGCAGAAGGAGUUCGGCAACCCACACGUGUCUGGCGGCCUGAAGGAGGGCAUCGAGACACUGCU |
| | | GAUGACACAGCGGCCCGCCCUGAGCGGCGACGCAGUGCAGAAGAUGCUGGGACACUGCACCUUUGAGCCAGCCGAGCCCAAGG |
| | | CCGCCAAGAAUACCUACACAGCCGAGCGGUUCAUCUGGCUGACAAAGCUGAACAAUCUGAGGAUCCUGGAGCAGGGAAGCGAG |
| | | CGCCCACUGACCGACACAGAGAGGGCCACCCUGAUGGAUGAGCCCUACCGCAAGUCCAAGCUGACAUAUGCACAGGCAAGGAA |
| | | GCUGCUGGGCCUGGAGGACACCGCCUUCUUUAAGGGCCUGAGAUACGGCAAGGAUAACGCCGAGGCCUCUACACUGAUGGAGA |
| | | UGAAGGCCUAUCACGCCAUCAGCAGGGCCCUGGAGAAGGAGGGCCUGAAGGACAAGAAGUCCCCACUGAAUCUGUCUCCCGAG |
| | | CUGCAGGAUGAGAUCGGCACCGCCUUUAGCCUGUUCAAGACCGACGAGGAUAUCACAGGCAGACUGAAGGACAGGAUCCAGCC |
| | | AGAGAUCCUGGAGGCCCUGCUGAAGCACAUCAGCUUUGAUAAGUUCGUGCAGAUCAGCCUGAAGGCCCUGCGGAGGAUCGUGC |
| | | CACUGAUGGAGCAGGGCAAGAGGUACGACGAGGCCUGCGCCGAAAUCUACGGCGAUCACUAUGGCAAGAAGAACACAGAGGAG |
| | | AAAAUCUACCUGCCCCCUAUCCCCGCCGAUGAGAUCAGGAACCCUGUGGUGCUGCGCGCCCUGUCUCAGGCAAGAAAAGUGAU |
| | | CAACGGAGUGGUGCGCCGGUACGGCAGCCCCGCCAGAAUCCACAUCGAGACAGCCAGGGAAGUGGGCAAGUCCUUUAAGGACA |
| | | GAAAGGAGAUCGAGAAGAGGCAGGAGGAGAACAGAAAGGAUAGGGAGAAGGCCGCCGCCAAGUUCAGAGAGUACUUUCCUAAU |
| | | UUCGUGGGCGAGCCAAAGUCCAAGGAUAUCCUGAAGCUGAGGCUGUACGAGCAGCAGCACGGCAAGUGUCUGUAUUCUGGCAA |
| | | GGAGAUCAACCUGGGCCGCCUGAAUGAGAAGGGCUAUGUGGAGAUCGACCACGCCCUGCCUUUUUCUCGGACCUGGGACGAUA |
| | | GCUUCAACAAUAAGGUGCUGGUGCUGGGCUCUGAGAACCAGAAUAAGGGCAACCAGACACCCUACGAGUAUUUCAACGGCAAG |
| | | GACAAUAGCCGCGAGUGGCAGGAGUUUAAGGCAAGGGUGGAGACAAGCAGGUUCCCUCGGUCCAAGAAGCAGAGAAUCCUGCU |
| | | GCAGAAGUUUGACGAGGAUGGCUUCAAGGAGAGGAACCUGAAUGACACCCGCUACGUGAAUCGGUUUCUGUGCCAGUUCGUGG |
| | | CCGAUAGAAUGAGGCUGACCGGCAAGGGCAAGAAGAGAGUGUUUGCCUCCAACGGCCAGAUCACAAAUCUGCUGAGGGGCUUC |
| | | UGGGGCCUGAGAAAGGUGAGGGCAGAGAACGACAGGCACCACGCACUGGAUGCAGUGGUGGUGGCAUGUUCUACCGUGGCCAU |
| | | GCAGCAGAAGAUCACACGCUUUGUGCGGUAUAAGGAGAUGAAUGCCUUCGACGGCAAGACCAUCGAUAAGGAGACAGGCGAGG |
| | | UGCUGCACCAGAAGACACACUUUCCUCAGCCAUGGGAGUUCUUUGCCCAGGAAGUGAUGAUCCGGGUGUUUGGCAAGCCUGAC |
| | | GGCAAGCCAGAGUUCGAGGAGGCCGAUACCCUGGAGAAGCUGAGAACACUGCUGGCAGAGAAGCUGAGCUCCAGGCCCGAGGC |
| | | AGUGCACGAGUACGUGACCCCACUGUUCGUGUCUAGAGCCCCCAACAGGAAGAUGAGCGGCCAGGGCCACAUGGAGACAGUGA |
| | | AGUCCGCCAAGAGACUGGACGAGGGCGUGUCUGUGCUGAGGGUGCCUCUGACACAGCUGAAGCUGAAGGAUCUGGAGAAGAUG |
| | | GUGAAUCGCGAGCGGGAGCCAAAGCUGUAUGAGGCCCUGAAGGCAAGGCUGGAGGCACACAAGGACGAUCCUGCCAAGGCCUU |
| | | UGCCGAGCCAUUCUACAAGUAUGAUAAGGCCGGCAACAGAACCCAGCAGGUGAAGGCCGUGAGGGUGGAGCAGGUGCAGAAGA |
| | | CAGGCGUGUGGGUGCGCAACCACAAUGGCAUCGCCGACAAUGCUACCAUGGUGCGGGUGGACGUGUUUGAGAAGGGCGAUAAG |
| | | UACUAUCUGGUGCCCAUCUACAGCUGGCAGGUGGCCAAGGGCAUCCUGCCUGAUAGAGCCGUGGUGCAGGGCAAGGACGAGGA |
| | | GGAUUGGCAGCUGAUCGACGAUUCCUUCAACUUUAAGUUCUCUCUGCACCCCAAUGACCUGGUGGAAGUGAUCACCAAGAAGG |
| | | CCAGGAUGUUUGGCUACUUCGCCUCCUGCCACCGCGGCACAGGCAACAUCAAUAUCCGGAUCCACGACCUGGAUCACAAGAUC |
| | | GGCAAGAACGGCAUCCUGGAGGGCAUCGGCGUGAAGACAGCCCUGAGCUUCCAGAAGUAUCAGAUCGACGAGCUGGGCAAGGA |
| | | GAUCAGACCUUGUAGGCUGAAGAAGCGCCCACCCGUGCGGUCCGAGUCCGCCACCCCCGAGUCCGUGUCCGGCUGGCGGCUGU |
| | | UCAAGAAGAUCUCCUAG |
| Exemplary | 320 | augGACGGCUCCGGCGGCGGCUCCCCCAAGAAGAAGCGGAAGGUGGAGGACAAGCGGCCCGCCGCCACCAAGAAGGCCGGCCA |
| open | | GGCCAAGAAGAAGAAGGGCGGCUCCGGCGGCGGCGCCGCCUUCAAGCCCAACUCCAUCAACUACAUCCUGGGCCUGGACAUCG |
| reading | | GCAUCGCCUCCGUGGGCUGGGCCAUGGUGGAGAUCGACGAGGAGGAGAACCCCAUCCGGCUGAUCGACCUGGGCGUGCGGGUG |
| frame for | | UUCGAGCGGGCCGAGGUGCCCAAGACCGGCGACUCCCUGGCCAUGGCCCGGCGGCUGGCCCGGUCCGUGCGGCGGCUGACCCG |
| Nme1Cas9 | | GCGGCGGGCCCACCGGCUGCUGCGGACCCGGCGGCUGCUGAAGCGGGAGGGCGUGCUGCAGGCCGCCAACUUCGACGAGAACG |
| with | | GCCUGAUCAAGUCCCUGCCCAACACCCCCUGGCAGCUGCGGGCCGCCGCCCUGGACCGGAAGCUGACCCCCCUGGAGUGGUCC |
| HiBiT tag | | GCCGUGCUGCUGCACCUGAUCAAGCACCGGGGCUACCUGUCCCAGCGGAAGAACGAGGGCGAGACCGCCGACAAGGAGCUGGG |
| | | CGCCCUGCUGAAGGGCGUGGCCGGCAACGCCCACGCCCUGCAGACCGGCGACUUCCGGACCCCCGCCGAGCUGGCCCUGAACA |
| | | AGUUCGAGAAGGAGUCCGGCCACAUCCGGAACCAGCGGUCCGACUACUCCCACACCUUCUCCCGGAAGGACCUGCAGGCCGAG |
| | | CUGAUCCUGCUGUUCGAGAAGCAGAAGGAGUUCGGCAACCCCCACGUGUCCGGCGGCCUGAAGGAGGGCAUCGAGACCCUGCU |
| | | GAUGACCCAGCGGCCCGCCCUGUCCGGCGACGCCGUGCAGAAGAUGCUGGGCCACUGCACCUUCGAGCCCGCCGAGCCCAAGG |
| | | CCGCCAAGAACACCUACACCGCCGAGCGGUUCAUCUGGCUGACCAAGCUGAACAACCUGCGGAUCCUGGAGCAGGGCUCCGAG |
| | | CGGCCCCUGACCGACACCGAGCGGGCCACCCUGAUGGACGAGCCCUACCGGAAGUCCAAGCUGACCUACGCCCAGGCCCGGAA |
| | | GCUGCUGGGCCUGGAGGACACCGCCUUCUUCAAGGGCCUGCGGUACGGCAAGGACAACGCCGAGGCCUCCACCCUGAUGGAGA |
| | | UGAAGGCCUACCACGCCAUCUCCCGGGCCCUGGAGAAGGAGGGCCUGAAGGACAAGAAGUCCCCCCUGAACCUGUCCCCCGAG |
| | | CUGCAGGACGAGAUCGGCACCGCCUUCUCCCUGUUCAAGACCGACGAGGACAUCACCGGCCGGCUGAAGGACCGGAUCCAGCC |
| | | CGAGAUCCUGGAGGCCCUGCUGAAGCACAUCUCCUUCGACAAGUUCGUGCAGAUCUCCCUGAAGGCCCUGCGGCGGAUCGUGC |
| | | CCCUGAUGGAGCAGGGCAAGCGGUACGACGAGGCCUGCGCCGAGAUCUACGGCGACCACUACGGCAAGAAGAACACCGAGGAG |
| | | AAGAUCUACCUGCCCCCCAUCCCCGCCGACGAGAUCCGGAACCCCGUGGUGCUGCGGGCCCUGUCCCAGGCCCGGAAGGUGAU |
| | | CAACGGCGUGGUGCGGCGGUACGGCUCCCCCGCCCGGAUCCACAUCGAGACCGCCCGGGAGGUGGGCAAGUCCUUCAAGGACC |
| | | GGAAGGAGAUCGAGAAGCGGCAGGAGGAGAACCGGAAGGACCGGGAGAAGGCCGCCGCCAAGUUCCGGGAGUACUUCCCCAAC |
| | | UUCGUGGGCGAGCCCAAGUCCAAGGACAUCCUGAAGCUGCGGCUGUACGAGCAGCAGCACGGCAAGUGCCUGUACUCCGGCAA |
| | | GGAGAUCAACCUGGGCCGGCUGAACGAGAAGGGCUACGUGGAGAUCGACCACGCCCUGCCCUUCUCCCGGACCUGGGACGACU |
| | | CCUUCAACAACAAGGUGCUGGUGCUGGGCUCCGAGAACCAGAACAAGGGCAACCAGACCCCCUACGAGUACUUCAACGGCAAG |
| | | GACAACUCCCGGGAGUGGCAGGAGUUCAAGGCCCGGGUGGAGACCUCCCGGUUCCCCCGGUCCAAGAAGCAGCGGAUCCUGCU |
| | | GCAGAAGUUCGACGAGGACGGCUUCAAGGAGCGGAACCUGAACGACACCCGGUACGUGAACCGGUUCCUGUGCCAGUUCGUGG |
| | | CCGACCGGAUGCGGCUGACCGGCAAGGGCAAGAAGCGGGUGUUCGCCUCCAACGGCCAGAUCACCAACCUGCUGCGGGGCUUC |
| | | UGGGGCCUGCGGAAGGUGCGGGCCGAGAACGACCGGCACCACGCCCUGGACGCCGUGGUGGUGGCCUGCUCCACCGUGGCCAU |
| | | GCAGCAGAAGAUCACCCGGUUCGUGCGGUACAAGGAGAUGAACGCCUUCGACGGCAAGACCAUCGACAAGGAGACCGGCGAGG |
| | | UGCUGCACCAGAAGACCCACUUCCCCCAGCCCUGGGAGUUCUUCGCCCAGGAGGUGAUGAUCCGGGUGUUCGGCAAGCCCGAC |
| | | GGCAAGCCCGAGUUCGAGGAGGCCGACACCCUGGAGAAGCUGCGGACCCUGCUGGCCGAGAAGCUGUCCUCCCGGCCCGAGGC |
| | | CGUGCACGAGUACGUGACCCCCCUGUUCGUGUCCCGGGCCCCCAACCGGAAGAUGUCCGGCCAGGGCCACAUGGAGACCGUGA |
| | | AGUCCGCCAAGCGGCUGGACGAGGGCGUGUCCGUGCUGCGGGUGCCCCUGACCCAGCUGAAGCUGAAGGACCUGGAGAAGAUG |
| | | GUGAACCGGGAGCGGGAGCCCAAGCUGUACGAGGCCCUGAAGGCCCGGCUGGAGGCCCACAAGGACGACCCCGCCAAGGCCUU |
| | | CGCCGAGCCCUUCUACAAGUACGACAAGGCCGGCAACCGGACCCAGCAGGUGAAGGCCGUGCGGGUGGAGCAGGUGCAGAAGA |
| | | CCGGCGUGUGGGUGCGGAACCACAACGGCAUCGCCGACAACGCCACCAUGGUGCGGGUGGACGUGUUCGAGAAGGGCGACAAG |
| | | UACUACCUGGUGCCCAUCUACUCCUGGCAGGUGGCCAAGGGCAUCCUGCCCGACCGGGCCGUGGUGCAGGGCAAGGACGAGGA |
| | | GGACUGGCAGCUGAUCGACGACUCCUUCAACUUCAAGUUCUCCCUGCACCCCAACGACCUGGUGGAGGUGAUCACCAAGAAGG |
| | | CCCGGAUGUUCGGCUACUUCGCCUCCUGCCACCGGGGCACCGGCAACAUCAACAUCCGGAUCCACGACCUGGACCACAAGAUC |
| | | GGCAAGAACGGCAUCCUGGAGGGCAUCGGCGUGAAGACCGCCCUGUCCUUCCAGAAGUACCAGAUCGACGAGCUGGGCAAGGA |
| | | GAUCCGGCCCUGCCGGCUGAAGAAGCGGCCCCCCGUGCGGUCCGAGUCCGCCACCCCCGAGUCCGUGUCCGGCUGGCGGCUGU |
| | | UCAAGAAGAUCUCCUAG |
| Exemplary | 321 | augGACGGCUCCGGCGGCGGCUCCCCCAAGAAGAAGCGGAAGGUGGAGGACAAGCGGCCCGCCGCCACCAAGAAGGCCGGCCA |
| open | | GGCCAAGAAGAAGAAGGGCGGCUCCGGCGGCGCCGCCUUCAAGCCCAACCCCAUCAACUACAUCCUGGGCCUGGACAUCGGCA |
| reading | | UCGCCUCCGUGGGCUGGGCCAUGGUGGAGAUCGACGAGGAGGAGAACCCCAUCCGGCUGAUCGACCUGGGCGUGCGGGUGUUC |
| frame for | | GAGCGGGCCGAGGUGCCCAAGACCGGCGACUCCCUGGCCAUGGCCCGGCGGCUGGCCCGGUCCGUGCGGCGGCUGACCCGGCG |
| Nme3Cas9 | | GCGGGCCCACCGGCUGCUGCGGGCCCGGCGGCUGCUGAAGCGGGAGGGCGUGCUGCAGGCCGCCGACUUCGACGAGAACGGCC |
| with | | UGAUCAAGUCCCUGCCCAACACCCCCUGGCAGCUGCGGGCCGCCGCCCUGGACCGGAAGCUGACCCCCCUGGAGUGGUCCGCC |
| HiBiT tag | | GUGCUGCUGCACCUGAUCAAGCACCGGGGCUACCUGUCCCAGCGGAAGAACGAGGGCGAGACCGCCGACAAGGAGCUGGGCGC |
| | | CCUGCUGAAGGGCGUGGCCGACAACGCCCACGCCCUGCAGACCGGCGACUUCCGGACCCCCGCCGAGCUGGCCCUGAACAAGU |
| | | UCGAGAAGGAGUGCGGCCACAUCCGGAACCAGCGGGGCGACUACUCCCACACCUUCUCCCGGAAGGACCUGCAGGCCGAGCUG |
| | | AACCUGCUGUUCGAGAAGCAGAAGGAGUUCGGCAACCCCCACGUGUCCGGCGGCCUGAAGGAGGGCAUCGAGACCCUGCUGAU |
| | | GACCCAGCGGCCCGCCCUGUCCGGCGACGCCGUGCAGAAGAUGCUGGGCCACUGCACCUUCGAGCCCGCCGAGCCCAAGGCCG |
| | | CCAAGAACACCUACACCGCCGAGCGGUUCAUCUGGCUGACCAAGCUGAACAACCUGCGGAUCCUGGAGCAGGGCUCCGAGCGG |
| | | CCCCUGACCGACACCGAGCGGGCCACCCUGAUGGACGAGCCCUACCGGAAGUCCAAGCUGACCUACGCCCAGGCCCGGAAGCU |
| | | GCUGUCCCUGGAGGACACCGCCUUCUUCAAGGGCCUGCGGUACGGCAAGGACAACGCCGAGGCCUCCACCCUGAUGGAGAUGA |
| | | AGGCCUACCACACCAUCUCCCGGGCCCUGGAGAAGGAGGGCCUGAAGGACAAGAAGUCCCCCCUGAACCUGUCCCCCGAGCUG |
| | | CAGGACGAGAUCGGCACCGCCUUCUCCCUGUUCAAGACCGACGAGGACAUCACCGGCCGGCUGAAGGACCGGAUCCAGCCCGA |
| | | GAUCCUGGAGGCCCUGCUGAAGCACAUCUCCUUCGACAAGUUCGUGCAGAUCUCCCUGAAGGCCCUGCGGCGGAUCGUGCCCC |
| | | UGAUGGAGCAGGGCAAGCGGUACGACGAGGCCUGCGCCGAGAUCUACGGCGACCACUACGGCAAGAAGAACACCGAGGAGAAG |
| | | AUCUACCUGCCCCCCAUCCCCGCCGACGAGAUCCGGAACCCCGUGGUGCUGCGGGCCCUGUCCCAGGCCCGGAAGGUGAUCAA |
| | | CGGCGUGGUGCGGCGGUACGGCUCCCCCGCCCGGAUCCACAUCGAGACCGCCCGGGAGGUGGGCAAGUCCUUCAAGGACCGGA |
| | | AGGAGAUCGAGAAGCGGCAGGAGGAGAACCGGAAGGACCGGGAGAAGGCCGCCGCCAAGUUCCGGGAGUACUUCCCCAACUUC |
| | | GUGGGCGAGCCCAAGUCCAAGGACAUCCUGAAGCUGCGGCUGUACGAGCAGCAGCACGGCAAGUGCCUGUACUCCGGCAAGGA |
| | | GAUCAACCUGGGCCGGCUGAACGAGAAGGGCUACGUGGAGAUCGACCACGCCCUGCCCUUCUCCCGGACCUGGGACGACUCCU |
| | | UCAACAACAAGGUGCUGGUGCUGGGCUCCGAGAACCAGAACAAGGGCAACCAGACCCCCUACGAGUACUUCAACGGCAAGGAC |
| | | AACUCCCGGGAGUGGCAGGAGUUCAAGGCCCGGGUGGAGACCUCCCGGUUCCCCCGGUCCAAGAAGCAGCGGAUCCUGCUGCA |
| | | GAAGUUCGACGAGGACGGCUUCAAGGAGCGGAACCUGAACGACACCCGGUACGUGAACCGGUUCCUGUGCCAGUUCGUGGCCG |
| | | ACCGGAUGCGGCUGACCGGCAAGGGCAAGAAGCGGGUGUUCGCCUCCAACGGCCAGAUCACCAACCUGCUGCGGGGCUUCUGG |
| | | GGCCUGCGGAAGGUGCGGGCCGAGAACGACCGGCACCACGCCCUGGACGCCGUGGUGGUGGCCUGCUCCACCGUGGCCAUGCA |
| | | GCAGAAGAUCACCCGGUUCGUGCGGUACAAGGAGAUGAACGCCUUCGACGGCAAGACCAUCGACAAGGAGACCGGCGAGGUGC |
| | | UGCACCAGAAGACCCACUUCCCCCAGCCCUGGGAGUUCUUCGCCCAGGAGGUGAUGAUCCGGGUGUUCGGCAAGCCCGACGGC |
| | | AAGCCCGAGUUCGAGGAGGCCGACACCCCCGAGAAGCUGCGGACCCUGCUGGCCGAGAAGCUGUCCUCCCGGCCCGAGGCCGU |
| | | GCACGAGUACGUGACCCCCCUGUUCGUGUCCCGGGCCCCCAACCGGAAGAUGUCCGGCCAGGGCCACAUGGAGACCGUGAAGU |
| | | CCGCCAAGCGGCUGGACGAGGGCGUGUCCGUGCUGCGGGUGCCCCUGACCCAGCUGAAGCUGAAGGACCUGGAGAAGAUGGUG |
| | | AACCGGGAGCGGGAGCCCAAGCUGUACGAGGCCCUGAAGGCCCGGCUGGAGGCCCACAAGGACGACCCCGCCAAGGCCUUCGC |
| | | CGAGCCCUUCUACAAGUACGACAAGGCCGGCAACCGGACCCAGCAGGUGAAGGCCGUGCGGGUGGAGCAGGUGCAGAAGACCG |
| | | GCGUGUGGGUGCGGAACCACAACGGCAUCGCCGACAACGCCACCAUGGUGCGGGUGGACGUGUUCGAGAAGGGCGACAAGUAC |
| | | UACCUGGUGCCCAUCUACUCCUGGCAGGUGGCCAAGGGCAUCCUGCCCGACCGGGCCGUGGUGGCCUACGCCGACGAGGAGGA |
| | | CUGGACCGUGAUCGACGAGUCCUUCCGGUUCAAGUUCGUGCUGUACUCCAACGACCUGAUCAAGGUGCAGCUGAAGAAGGACU |
| | | CCUUCCUGGGCUACUUCUCCGGCCUGGACCGGGCCACCGGCGCCAUCUCCCUGCGGGAGCACGACCUGGAGAAGUCCAAGGGC |
| | | AAGGACGGCAUGCACCGGAUCGGCGUGAAGACCGCCCUGUCCUUCCAGAAGUACCAGAUCGACGAGAUGGGCAAGGAGAUCCG |
| | | GCCCUGCCGGCUGAAGAAGCGGCCCCCCGUGCGGUCCGAGUCCGCCACCCCCGAGUCCGUGUCCGGCUGGCGGCUGUUCAAGA |
| | | AGAUCUCCUAG |

TABLE 39B
Additional Sequences

| | SEQ | |
|---|---|---|
| | ID | |
| Description | NO | sequence |
| exemplary XTEN | 58 | SGSETPGTSESATPES |
| exemplary XTEN | 59 | SGSETPGTSESA |
| exemplary XTEN | 60 | SGSETPGTSESATPEGGSGGS |
| amino acid sequence for exemplary | 61 | GGS |
| linker | | |
| amino acid sequence for exemplary | 62 | GGGGS |
| linker | | |
| amino acid sequence for exemplary | 63 | EAAAK |
| linker | | |
| amino acid sequence for exemplary | 64 | SEGSA |
| linker | | |
| amino acid sequence for exemplary | 65 | SEGSAGTST |
| linker | | |
| amino acid sequence for exemplary | 66 | GGGGSGGGGS |
| linker | | |
| amino acid sequence for exemplary | 67 | GGGGSEAAAK |
| linker | | |
| amino acid sequence for exemplary | 68 | EAAAKGGGGS |
| linker | | |
| amino acid sequence for exemplary | 69 | EAAAKEAAAK |
| linker | | |
| amino acid sequence for exemplary | 70 | SEGSAGTSTESEGSA |
| linker | | |
| amino acid sequence for exemplary | 71 | GGGGSGGGGSGGGGS |
| linker | | |
| amino acid sequence for exemplary | 72 | GGGGSGGGGSEAAAK |
| linker | | |
| amino acid sequence for exemplary | 73 | GGGGSEAAAKGGGGS |
| linker | | |
| amino acid sequence for exemplary | 74 | EAAAKGGGGSEAAAK |
| linker | | |
| amino acid sequence for exemplary | 75 | EAAAKEAAAKGGGGS |
| linker | | |
| amino acid sequence for exemplary | 76 | SEGSAGTSTESEGSAGTSTE |
| linker | | |
| amino acid sequence for exemplary | 77 | GGGGSGGGGSGGGGSEAAAK |
| linker | | |
| amino acid sequence for exemplary | 78 | GGGGSGGGGSEAAAKGGGGS |
| linker | | |
| amino acid sequence for exemplary | 79 | GGGGSEAAAKGGGGSEAAAK |
| linker | | |
| amino acid sequence for exemplary | 80 | GGGGSEAAAKEAAAKGGGGS |
| linker | | |
| amino acid sequence for exemplary | 81 | GGGGSEAAAKEAAAKEAAAK |
| linker | | |
| amino acid sequence for exemplary | 82 | EAAAKGGGGSGGGGSGGGGS |
| linker | | |
| amino acid sequence for exemplary | 83 | EAAAKGGGGSGGGGSEAAAK |
| linker | | |
| amino acid sequence for exemplary | 84 | EAAAKGGGGSEAAAKGGGGS |
| linker | | |
| amino acid sequence for exemplary | 85 | EAAAKGGGGSEAAAKEAAAK |
| linker | | |
| amino acid sequence for exemplary | 86 | EAAAKEAAAKGGGGSGGGGS |
| linker | | |
| amino acid sequence for exemplary | 87 | EAAAKEAAAKGGGGSEAAAK |
| linker | | |
| amino acid sequence for exemplary | 88 | EAAAKEAAAKEAAAKGGGGS |
| linker | | |
| amino acid sequence for exemplary | 89 | SEGSAGTSTESEGSAGTSTESEGSA |
| linker | | |
| amino acid sequence for exemplary | 90 | GGGGSGGGGSGGGGSGGGGSGGGGS |
| linker | | |
| amino acid sequence for exemplary | 91 | GGGGSGGGGSGGGGSGGGGSEAAAK |
| linker | | |
| amino acid sequence for exemplary | 92 | GGGGSGGGGSGGGGSEAAAKGGGGS |
| linker | | |
| amino acid sequence for exemplary | 93 | GGGGSGGGGSGGGGSEAAAKEAAAK |
| linker | | |
| amino acid sequence for exemplary | 94 | GGGGSGGGGSEAAAKGGGGSGGGGS |
| linker | | |
| amino acid sequence for exemplary | 95 | GGGGSGGGGSEAAAKGGGGSEAAAK |
| linker | | |
| amino acid sequence for exemplary | 96 | GGGGSGGGGSEAAAKEAAAKGGGGS |
| linker | | |
| amino acid sequence for exemplary | 97 | GGGGSGGGGSEAAAKEAAAKEAAAK |
| linker | | |
| amino acid sequence for exemplary | 98 | GGGGSEAAAKGGGGSGGGGSGGGGS |
| linker | | |
| amino acid sequence for exemplary | 99 | GGGGSEAAAKGGGGSGGGGSEAAAK |
| linker | | |
| amino acid sequence for exemplary | 100 | GGGGSEAAAKGGGGSEAAAKGGGGS |
| linker | | |
| amino acid sequence for exemplary | 101 | GGGGSEAAAKGGGGSEAAAKEAAAK |
| linker | | |
| amino acid sequence for exemplary | 102 | GGGGSEAAAKEAAAKGGGGSGGGGS |
| linker | | |
| amino acid sequence for exemplary | 103 | GGGGSEAAAKEAAAKEAAAKGGGGS |
| linker | | |
| amino acid sequence for exemplary | 104 | GGGGSEAAAKEAAAKEAAAKEAAAK |
| linker | | |
| amino acid sequence for exemplary | 105 | EAAAKGGGGSGGGGSGGGGSGGGGS |
| linker | | |
| amino acid sequence for exemplary | 106 | EAAAKGGGGSGGGGSGGGGSEAAAK |
| linker | | |
| amino acid sequence for exemplary | 107 | EAAAKGGGGSGGGGSEAAAKGGGGS |
| linker | | |
| amino acid sequence for exemplary | 108 | EAAAKGGGGSGGGGSEAAAKEAAAK |
| linker | | |
| amino acid sequence for exemplary | 109 | EAAAKGGGGSEAAAKGGGGSGGGGS |
| linker | | |
| amino acid sequence for exemplary | 110 | EAAAKGGGGSEAAAKGGGGSEAAAK |
| linker | | |
| amino acid sequence for exemplary | 111 | EAAAKGGGGSEAAAKEAAAKGGGGS |
| linker | | |
| amino acid sequence for exemplary | 112 | EAAAKGGGGSEAAAKEAAAKEAAAK |
| linker | | |
| amino acid sequence for exemplary | 113 | EAAAKEAAAKGGGGSEAAAKGGGGS |
| linker | | |
| amino acid sequence for exemplary | 114 | EAAAKEAAAKGGGGSEAAAKEAAAK |
| linker | | |
| amino acid sequence for exemplary | 115 | EAAAKEAAAKEAAAKGGGGSEAAAK |
| linker | | |
| amino acid sequence for exemplary | 116 | EAAAKEAAAKEAAAKEAAAKGGGGS |
| linker | | |
| amino acid sequence for exemplary | 117 | EAAAKEAAAKEAAAKEAAAKEAAAK |
| linker | | |
| amino acid sequence for exemplary | 118 | GTKDSTKDIPETPSKD |
| linker | | |
| amino acid sequence for exemplary | 119 | GRDVRQPEVKEEKPES |
| linker | | |
| amino acid sequence for exemplary | 120 | EGKSSGSGSESKSTAG |
| linker | | |
| amino acid sequence for exemplary | 121 | TPGSPAGSPTSTEEGT |
| linker | | |
| amino acid sequence for exemplary | 122 | GSEPATSGSETPGTST |
| linker | | |
| | 123- | |
| | 129 | |
| G000502 | 130 | mA*mC*mA*CAAAUACCAGUCCAGCGGUUUUAGAmGmCmUmAmGmAm |
| | | AmAmUmAmGmCAAGUUAAAAUAAGGCUAGUCCGUUAUCAmAmCmUmU |
| | | mGmAmAmAmAmAmGmUmGmGmCmAmCmCmGmAmGmUmCmGmGmUmGm |
| | | CmU*mU*mU*mU |
| G017564 | 131 | mG*mG*mC*CUGGCUGAUGAGGCCGCACAUGUUGUAGCUCCCU*mG* |
| | | mA*mA*mA*CCGUUGCUACAAUAAGGCCGUmC*mU*mG*mA*mA*mA |
| | | *mA*mGAUGUGCCGCAACGCUCUGCCG*mC*mU*mU*mC*mU*mG*C |
| | | GGCAUCGUUU*mA*mU*mC |
| G017565 | 132 | mG*mG*mC*CUGGCUGAUGAGGCCGCACAUGUUGUAGCUCCCU*mG* |
| | | mA*mA*mA*CCGUUGCUACAAUAAGGCCGUmC*mU*mG*mA*mA*mA |
| | | *mA*mGAUGUGCCGCAACGCUCUGCCmU*mU*mC*mUGGCAUCGUUU |
| | | *mA*mU*mC |
| G017566 | 133 | mG*mG*mC*CUGGCUGAUGAGGCCGCACAUGUUGUAGCUCCCU*mG* |
| | | mA*mA*mA*CCGUUGCUACAAUAAGGCCGUmC*mG*mA*mA*mA*mG |
| | | AUGUGCCGCAACGCUCUGCCmU*mU*mC*mUGGCAUCGUUU*mA*mU |
| | | *mC |
| G020055 | 134 | mG*mUGUGUCCCmUCUmCCCCACCCGUCCmGUUGmUmAmGmCUCCCm |
| | | UmGmAmAmAmCmCGUUmGmCUAmCAAUAAGmGmCCmGmUmCmGmAmA |
| | | mAmGmAmUGUGCmCGCAACGCUCUmGmCCmUmUmCmUGGCAUCGUUU |
| | | AmU*mU |
| G020361 | 135 | mG*mGC*CUGGCUmGAUmGAGGCCGCACAUmGUUGmUmAmGmCUCCC |
| | | UmCmGmAmAmAmGCCGUUmGmCUAmCAAU*A*AGmGmCCmGmUmCmG |
| | | mAmAmAmGmAmUGUGCmCGCAACGCUCUmGmCCmUmUmCmUGGCAUC |
| | | GUUU*AmU*mU |
| G020848 | 136 | mU*mGA*GGACCGmCCCmUGGGCCUGGGAGmGUUGmUmAmGmCUCCC |
| | | UmCmGmAmAmAmGCCGUUmGmCUAmCAAU*A*AGmGmCCmGmUmCmG |
| | | mAmAmAmGmAmUGUGCmCGCAACGCUCUmGmCCmUmUmCmUGGCAUC |
| | | GUUU*AmU*mU |
| G021256 | 137 | mC*mCAAGUGUCmUUCmCAGUACGAUUUGmGUUGmUmAmGmCUCCCm |
| | | UmGmAmAmAmCmCGUUmGmCUAmCAAU*AAGmGmCCmGmUmCmGmAm |
| | | AmAmGmAmUGUGCmCGCmAmAmCmGCUCUmGmCCmUmUmCmUGmGCm |
| | | AmUC*mG*mU*mU |
| G021320 | 138 | mC*mUUCACCAGmGAGmAAGCCGUCACACmGUUGmUmAmGmCUCCCm |
| | | UmGmAmAmAmCmCGUUmGmCUAmCAAU*AAGmGmCCmGmUmCmGmAm |
| | | AmAmGmAmUGUGCmCGCmAmAmCmGCUCUmGmCCmUmUmCmUGmGCm |
| | | AmUC*mG*mU*mU |
| G021536 | 139 | mC*mC*mA*mAmGUGmUmCUmUCmCAGUAmCGAUmUUGmGUUGmUmA |
| | | mGmCUCCCmUmGmAmAmAmCmCGUUmGmCUAmCAAU*AAGmGmCCmG |
| | | mUmCmGmAmAmAmGmAmUGUGCmCGmCAAmCGCUCUmGmCCmUmUmC |
| | | mUGGCAUCG*mU*mU |
| | 140 | Not used |
| G021844 | 141 | mC*mC*mA*mAmGUGmUmCUmUCmCAGUAmCGAUmUUGmGUUGmUmA |
| | | mGmCUCCCmUmUmC(L1)mGmAmCmCGUUmGmCUAmCAAU*AAGmGm |
| | | CCmGmUmC(L1)mGmAmUGUGCmCGmCAAmCGCUCUmGmCC(L1)GG |
| | | CAUCG*mU*mU |
| G021845 | 142 | mC*mU*mU*mCmACCmAmGGmAGmAAGCCmGUCAmCACmGUUGmUmA |
| | | mGmCUCCCmUmGmAmAmAmCmCGUUmGmCUAmCAAU*AAGmGmCCmG |
| | | mUmCmGmAmAmAmGmAmUGUGCmCGmCAAmCGCUCUmGmCCmUmUmC |
| | | mUGGCAUCG*mU*mU |
| G021846 | 143 | mC*mU*mU*mCmACCmAmGGmAGmAAGCCmGUCAmCACmGUUGmUmA |
| | | mGmCUCCCmUmUmC(L1)mGmAmCmCGUUmGmCUAmCAAU*AAGmGm |
| | | CCmGmUmC(L1)mGmAmUGUGCmCGmCAAmCGCUCUmGmCC(L1)GG |
| | | CAUCG*mU*mU |
| G023413 | 144 | mC*mC*mA*mAmGUGmUmCUmUCmCAGUAmCGAUmUUGmGUUGmUmA |
| | | mGmCUCCCmUmUmG(L1)mCmAmCmCGUUmGmCUAmCAAU*AAGmGm |
| | | CCmGmUmC(L1)mGmAmUGUGCmCGmCAAmCGCUCUmGmCC(L1)GG |
| | | CAUCGmU*mU |
| G023414 | 145 | mC*mC*mA*mAmGUGmUmCUmUCmCAGUAmCGAUmUUGmGUUGmUmA |
| | | mGmCUCCCmUmG(L1)mCmCmCGUUmGmCUAmCAAU*AAGmGmCCmG |
| | | mUmC(L1)mGmAmUGUGCmCGmCAAmCGCUCUmGmCC(L1)GGCAUC |
| | | GmU*mU |
| G023415 | 146 | mC*mC*mA*mAmGUGmUmCUmUCmCAGUAmCGAUmUUGmGUUGmUmA |
| | | mGmCUCCCmG(L1)mCmCGUUmGmCUAmCAAU*AAGmGmCCmGmUmC |
| | | (L1)mGmAmUGUGCmCGmCAAmCGCUCUmGmCC(L1)GGCAUCGmU* |
| | | mU |
| G023416 | 147 | mC*mC*mA*mAmGUGmUmCUmUCmCAGUAmCGAUmUUGmGUUGmUmA |
| | | mGmCUCCmG(L1)mCGUUmGmCUAmCAAU*AAGmGmCCmGmUmC(L1) |
| | | mGmAmUGUGCmCGmCAAmCGCUCUmGmCC(L1)GGCAUCGmU*mU |
| G023417 | 148 | mC*mC*mA*mAmGUGmUmCUmUCmCAGUAmCGAUmUUGmGUUGmUmA |
| | | mGmCUCC(L1)GUUmGmCUAmCAAU*AAGmGmCCmGmUmC(L1)mGm |
| | | AmUGUGCmCGmCAAmCGCUCUmGmCC(L1)GGCAUCGmU*mU |
| G023418 | 149 | mC*mC*mA*mAmGUGmUmCUmUCmCAGUAmCGAUmUUGmGUUGmUmA |
| | | mGmCUCCCmUmUmG(L1)mCmAmCmCGUUmGmCUAmCAAU*AAGmGm |
| | | CCmGmUmCmU(L1)mAmGmAmUGUGCmCGmCAAmCGCUCUmGmCC |
| | | (L1)GGCAUCGmU*mU |
| G023419 | 150 | mC*mC*mA*mAmGUGmUmCUmUCmCAGUAmCGAUmUUGmGUUGmUmA |
| | | mGmCUCCCmUmUmG(L1)mCmAmCmCGUUmGmCUAmCAAU*AAGmGm |
| | | CCmGmUmC(L1)mGmAmUGUGCmCGmCAAmCGCUCUmGmCCmU(L1) |
| | | mAGGCAUCGmU*mU |
| | 322- | NotUsed |
| | 350 | |
| G029377 | 351 | mC*mC*mA*mAmGUGmUmCUmUCmCAGUAmCGAUmUUGmGUUGmUmAmGmCU |
| | | CCCmUmGmAmAmAmCmCGUUmGmCUAmCAAUAAGmGmCCmGmUmCmGmAmAm |
| | | AmGmAmUGUGCmCGmCAAmCGCUCUmGmCCmUmUmCmUGGCAUCG*mU*mU |
| G029378 | 352 | mC*mC*mA*mAmGUGmUmCUmUCmCAGUAmCGAUmUUGmGUUGmUmAmGmCU |
| | | CCCmUmGmAmAmAmCmCGUUmGmCUAmCmAmAUAAGmGmCCmGmUmCmGmAm |
| | | AmAmGmAmUGUGCmCGmCAAmCGCUCUmGmCCmUmUmCmUGGCAUCG*mU*m |
| | | U |
| G029379 | 353 | mC*mC*mA*mAmGUGmUmCUmUCmCAGUAmCGAUmUUGmGUUGmUmAmGmCU |
| | | CCCmUmGmAmAmAmCmCGUUmGmCUAmCAmAUAAGmGmCCmGmUmCmGmAmA |
| | | mAmGmAmUGUGCmCGmCAAmCGCUCUmGmCCmUmUmCmUGGCAUCG*mU*mU |
| G029380 | 354 | mC*mC*mA*mAmGUGmUmCUmUCmCAGUAmCGAUmUUGmGUUGmUmAmGmCU |
| | | CCCmUmGmAmAmAmCmCGUUmGmCUAmCmAmAU*AAGmGmCCmGmUmCmGmA |
| | | mAmAmGmAmUGUGCmCGmCAAmCGCUCUmGmCCmUmUmCmUGGCAUCG*mU* |
| | | mU |
| G029381 | 355 | mC*mC*mA*mAmGUGmUmCUmUCmCAGUAmCGAUmUUGmGUUGmUmAmGmCU |
| | | CCCmUmGmAmAmAmCmCGUUmGmCUAmCAAdTAAGmGmCCmGmUmCmGmAmA |
| | | mAmGmAmUGUGCmCGmCAAmCGCUCUmGmCCmUmUmCmUGGCAUCG*mU*mU |
| G029382 | 356 | mC*mC*mA*mAmGUGmUmCUmUCmCAGUAmCGAUmUUGmGUUGmUmAmGmCU |
| | | CCCmUmGmAmAmAmCmCGUUmGmCUAmCAAU*AAGmGmCCmGmUmCmGmAmA |
| | | mAmGmAmUGUGCmCGmCAAmCmGCUCUmGmCCmUmUmCmUGGCAUCG*mU*m |
| | | U |
| G029383 | 357 | mC*mC*mA*mAmGUGmUmCUmUCmCAGUAmCGAUmUUGmGUUGmUmAmGmCU |
| | | CCCmUmGmAmAmAmCmCGUUmGmCUAmCAAU*AAGmGmCCmGmUmCmGmAmA |
| | | mAmGmAmUGUGCmCGmCAAmCGCUCmUmGmCCmUmUmCmUGGCAUCG*mU*m |
| | | U |
| G029384 | 358 | mC*mC*mA*mAmGUGmUmCUmUCmCAGUAmCGAUmUUGmGUUGmUmAmGmCU |
| | | CCCmUmGmAmAmAmCmCGUUmGmCUAmCAAU*AAGmGmCCmGmUmCmGmAmA |
| | | mAmGmAmUGUGCmCGmCAAmCGmCmUmCmUmGmCCmUmUmCmUGGCAUCG*m |
| | | U*mU |
| G029385 | 359 | mC*mC*mA*mAmGUGmUmCUmUCmCAGUAmCGAUmUUGmGUUGmUmAmGmCU |
| | | CCCmUmGmAmAmAmCmCGUUmGmCUAmCAAU*AAGmGmCCmGmUmCmGmAmA |
| | | mAmGmAmUGUGCmCGmCAAmCGmCmUmCUmGmCCmUmUmCmUGGCAUCG*mU |
| | | *mU |
| G029386 | 360 | mC*mC*mA*mAmGUGmUmCUmUCmCAGUAmCGAUmUUGmGUUGmUmAmGmCU |
| | | CCCmUmGmAmAmAmCmCGUUmGmCUAmCAAU*AAGmGmCCmGmUmCmGmAmA |
| | | mAmGmAmUGUGCmCGmCAAmCmGmCmUmCmUmGmCCmUmUmCmUGGCAUCG* |
| | | mU*mU |
| G029387 | 361 | mC*mC*mA*mAmGUGmUmCUmUCmCAGUAmCGAUmUUGmGUUGmUmAmGmCU |
| | | CCCmUmGmAmAmAmCmCGUUmGmCUAmCAAU*AAGmGmCCmGmUmCmGmAmA |
| | | mAmGmAmUGUGCmCGmCmAmAmCmGmCmUmCmUmGmCmCmUmUmCmUGGCAU |
| | | CG*mU*mU |
| G029388 | 362 | mC*mC*mA*mAmGUGmUmCUmUCmCAGUAmCGAUmUUGmGUUGmUmAmGmCU |
| | | CCCmUmGmAmAmAmCmCGUUmGmCUAmCAAU*AAGmGmCCmGmUmCmGmAmA |
| | | mAmGmAmUGUGCmCGmCAAmCGCUCUmGmCCmUmUmCmUGGCAUmCmG*mU* |
| | | mU |
| G029389 | 363 | mC*mC*mA*mAmGUGmUmCUmUCmCAGUAmCGAUmUUGmGUUGmUmAmGmCU |
| | | CCCmUmGmAmAmAmCmCGUUmGmCUAmCAAU*AAGmGmCCmGmUmCmGmAmA |
| | | mAmGmAmUGUGCmCGmCAAmCGCUCUmGmCCmUmUmCmUGGCmAmUmCmG*m |
| | | U*mU |
| G029390 | 364 | mC*mC*mA*mAmGUGmUmCUmUCmCAGUAmCGAUmUUGmGUUGmUmAmGmCU |
| | | CCCmUmGmAmAmAmCmCGUUmGmCUAmCAAU*AAGmGmCCmGmUmCmGmAmA |
| | | mAmGmAmUGUGCmCGmCmAmAmCmGmCmUmCmUmGmCmCmUmUmCmUGGCmA |
| | | mUmCmG*mU*mU |
| G029391 | 365 | mC*mC*mA*mAmGUGmUmCUmUCmCAGUAmCGAUmUUGmGUUGmUmAmGmCU |
| | | CCCmUmGmAmAmAmCmCGUUmGmCUAmCAAU*AAGmGmCCmGmUmCmGmAmA |
| | | mAmGmAmUGUGCmCGmCmAmAmCmGmCmUmCmUmGmCmCmUmUmCmUGGCAU |
| | | mCmG*mU*mU |
| G029392 | 366 | mC*mC*mA*mAmGUGmUmCUmUCmCAGUAmCGAUmUUGmGUUGmUmAmGmCU |
| | | CCCmUmGmAmAmAmCmCGUUmGmCUAmCAAU*AAGmGmCCmGmUmCmGmAmA |
| | | mAmGmAmUGUGCmCGmCAAmCmGmCmUmCmUmGmCCmUmUmCmUGGCAUmCm |
| | | G*mU*mU |
| | 367- | Not Used |
| | 382 | |
| SV40 NLS | 383 | PKKKRKVE |
| SV40 NLS | 384 | KKKRKVE |
| bipartite NLS | 385 | KRTADGSEFESPKKKRKVE |
| c-myc like NLS | 386 | PAAKKKKLD |
| Nucleic acid sequence for SV40 NLS | 387 | CCCAAGAAGAAGAGGAAAGTC |
| Amino acid sequence for SV40 NLS | 388 | PKKKRKV |
| U6 promoter | 389 | TTTCCCATGATTCCTTCATATTTGCATATACGATACAAGGCTGTTAG |
| | | AGAGATAATTGGAATTAATTTGACTGTAAACACAAAGATATTAGTAC |
| | | AAAATACGTGACGTAGAAAGTAATAATTTCTTGGGTAGTTTGCAGTT |
| | | TTAAAATTATGTTTTAAAATGGACTATCATATGCTTACCGTAACTTG |
| | | AAAGTATTTCGATTTCTTGGCTTTATATATCTTGTGGAAAGGACG |
| CMV promoter | 390 | ATAGTAATCAATTACGGGGTCATTAGTTCATAGCCCATATATGGAGT |
| | | TCCGCGTTACATAACTTACGGTAAATGGCCCGCCTGGCTGACCGCCC |
| | | AACGACCCCCGCCCATTGACGTCAATAATGACGTATGTTCCCATAGT |
| | | AACGCCAATAGGGACTTTCCATTGACGTCAATGGGTGGAGTATTTAC |
| | | GGTAAACTGCCCACTTGGCAGTACATCAAGTGTATCATATGCCAAGT |
| | | CCGCCCCCTATTGACGTCAATGACGGTAAATGGCCCGCCTGGCATTA |
| | | TGCCCAGTACATGACCTTACGGGACTTTCCTACTTGGCAGTACATCT |
| | | ACGTATTAGTCATCGCTATTACCATGGTGATGCGGTTTTGGCAGTAC |
| | | ACCAATGGGCGTGGATAGCGGTTTGACTCACGGGGATTTCCAAGTCT |
| | | CCACCCCATTGACGTCAATGGGAGTTTGTTTTGGCACCAAAATCAAC |
| | | GGGACTTTCCAAAATGTCGTAACAACTGCGATCGCCCGCCCCGTTGA |
| | | CGCAAATGGGCGGTAGGCGTGTACGGTGGGAGGTCTATATAAGCAGA |
| | | GCTCGTTTAGTGAACCGTCAGATC |
| Exemplary 5′ UTR | 391 | ACATTTGCTTCTGACACAACTGTGTTCACTAGCAACCTCAAACAGAC |
| | | ACC |
| Exemplary 5′ UTR | 392 | CATAAACCCTGGCGCGCTCGCGGCCCGGCACTCTTCTGGTCCCCACA |
| | | GACTCAGAGAGAACCCACC |
| Exemplary 5′ UTR | 393 | AAGCTCAGAATAAACGCTCAACTTTGGCC |
| Exemplary 5′ UTR | 394 | CAGGGTCCTGTGGACAGCTCACCAGCT |
| Exemplary 5′ UTR | 395 | TCCCGCAGTCGGCGTCCAGCGGCTCTGCTTGTTCGTGTGTGTGTCGT |
| | | TGCAGGCCTTATTC |
| Exemplary 5′ UTR | 396 | CAGATCGCCTGGAGACGCCATCCACGCTGTTTTGACCTCCAT |
| Exemplary 5′ UTR | 397 | AGAAGACACCGGGACCGATCCAGCCTCCGCGGCCGGGAACGG |
| Exemplary 5′ UTR | 398 | TGCATTGGAACGCGGATTCCCCGTGCCAAGAGTGACTCACCG |
| Exemplary 3′ UTR | 399 | GCTCGCTTTCTTGCTGTCCAATTTCTATTAAAGGTTCCTTTGTTCCC |
| | | TAAGTCCAACTACTAAACTGGGGGATATTATGAAGGGCCTTGAGCAT |
| | | CTGGATTCTGCCTAATAAAAAACATTTATTTTCATTGC |
| Exemplary 3′ UTR | 400 | GCTGGAGCCTCGGTGGCCATGCTTCTTGCCCCTTGGGCCTCCCCCCA |
| | | GCCCCTCCTCCCCTTCCTGCACCCGTACCCCCGTGGTCTTTGAATAA |
| | | AGTCTGAGTGGGCGGC |
| Exemplary 3′ UTR | 401 | ACCAGCCTCAAGAACACCCGAATGGAGTCTCTAAGCTACATAATACC |
| | | AACTTACACTTTACAAAATGTTGTCCCCCAAAATGTAGCCATTCGTA |
| | | TCTGCTCCTAATAAAAAGAAAGTTTCTTCACATTCT |
| Exemplary 3′ UTR | 402 | TTGCCAGCCATCTGTTGTTTGCCCCTCCCCCGTGCCTTCCTTGACCC |
| | | TGGAAGGTGCCACTCCCACTGTCCTTTCCTAATAAAATGAGGAAATT |
| | | GCATCGCA |
| Exemplary 3′ UTR | 403 | GCTGCCTTCTGCGGGGCTTGCCTTCTGGCCATGCCCTTCTTCTCTCC |
| | | CTTGCACCTGTACCTCTTGGTCTTTGAATAAAGCCTGAGTAGGAAG |
| Exemplary 3′ UTR | 404 | CTGGTACTGCATGCACGCAATGCTAGCTGCCCCTTTCCCGTCCTGGG |
| | | TACCCCGAGTCTCCCCCGACCTCGGGTCCCAGGTATGCTCCCACCTC |
| | | CACCTGCCCCACTCACCACCTCTGCTAGTTCCAGACACCTCCCAAGC |
| | | ACGCAGCAATGCAGCTCAAAACGCTTAGCCTAGCCACACCCCCACGG |
| | | GAAACAGCAGTGATTAACCTTTAGCAATAAACGAAAGTTTAACTAAG |
| | | CTATACTAACCCCAGGGTTGGTCAATTTCGTGCCAGCCACACC |
| Exemplary 3′ UTR | 405 | CAAGCACGCAGCAATGCAGCTCAAAACGCTTAGCCTAGCCACACCCC |
| | | CACGGGAAACAGCAGTGATTAACCTTTAGCAATAAACGAAAGTTTAA |
| | | CTAAGCTATACTAACCCCAGGGTTGGTCAATTTCGTGCCAGCCACAC |
| | | CCTGGTACTGCATGCACGCAATGCTAGCTGCCCCTTTCCCGTCCTGG |
| | | GTACCCCGAGTCTCCCCCGACCTCGGGTCCCAGGTATGCTCCCACCT |
| | | CCACCTGCCCCACTCACCACCTCTGCTAGTTCCAGACACCTCC |
| Exemplary 3′ UTR | 406 | ACCAGCCTCAAGAACACCCGAATGGAGTCTCTAAGCTACATAATACC |
| | | AACTTACACTTTACAAAATGTTGTCCCCCAAAATGTAGCCATTCGTA |
| | | TCTGCTCCTAATAAAAAGAAAGTTTCTTCACATTCTACCAGCCTCAA |
| | | GAACACCCGAATGGAGTCTCTAAGCTACATAATACCAACTTACACTT |
| | | TACAAAATGTTGTCCCCCAAAATGTAGCCATTCGTATCTGCTCCTAA |
| | | TAAAAAGAAAGTTTCTTCACATTCT |
| Exemplary Kozak sequence | 407 | GCCRCCAUGG |
| Exemplary Kozak sequence | 408 | GCCGCCRCCAUGG |
| Exemplary poly-A sequence | 409 | AAAAAAAAAAAAAAAAAAAAAAAAAAAAAAGCGAAAAAAAAAAAAAA |
| | | AAAAAAAAAAAAAAAACCGAAAAAAAAAAAAAAAAAAAAAAAAAAAA |
| | | AAAAAAAAAAA |
| Exemplary NLS 1 | 410 | LAAKRSRTT |
| Exemplary NLS 2 | 411 | QAAKRSRTT |
| Exemplary NLS 3 | 412 | PAPAKRERTT |
| Exemplary NLS 4 | 413 | QAAKRPRTT |
| Exemplary NLS 5 | 414 | RAAKRPRTT |
| Exemplary NLS 6 | 415 | AAAKRSWSMAA |
| Exemplary NLS 7 | 416 | AAAKRVWSMAF |
| Exemplary NLS 8 | 417 | AAAKRSWSMAF |
| Exemplary NLS 9 | 418 | AAAKRKYFAA |
| Exemplary NLS 10 | 419 | RAAKRKAFAA |
| Exemplary NLS 11 | 420 | RAAKRKYFAV |
| Alternative SV40 NLS | 421 | PKKKRRV |
| Nucleoplasmin NLS | 422 | KRPAATKKAGQAKKKK |
| Exemplary coding sequence for SV40 | 423 | CCGAAGAAGAAGAGAAAGGTC |
| NLS | | |
| Exemplary coding sequence for NLS1 | 424 | CTGGCAGCAAAGAGAAGCAGAACAACA |
| Exemplary coding sequence for NLS2 | 425 | CAGGCAGCAAAGAGAAGCAGAACAACA |
| Exemplary coding sequence for NLS3 | 426 | CCGGCACCGGCAAAGAGAGAAAGAACAACA |
| Exemplary coding sequence for NLS4 | 427 | CAGGCAGCAAAGAGACCGAGAACAACA |
| Exemplary coding sequence for NLS5 | 428 | AGAGCAGCAAAGAGACCGAGAACAACA |
| Exemplary coding sequence for NLS6 | 429 | GCAGCAGCAAAGAGAAGCTGGAGCATGGCAGCA |
| Exemplary coding sequence for NLS7 | 430 | GCAGCAGCAAAGAGAGTCTGGAGCATGGCATTC |
| Exemplary coding sequence for NLS8 | 431 | GCAGCAGCAAAGAGAAGCTGGAGCATGGCATTC |
| Exemplary coding sequence for NLS9 | 432 | GCAGCAGCAAAGAGAAAGTACTTCGCAGCA |
| Exemplary coding sequence for NLS10 | 433 | AGAGCAGCAAAGAGAAAGGCATTCGCAGCA |
| Exemplary coding sequence for NLS11 | 434 | AGAGCAGCAAAGAGAAAGTACTTCGCAGTC |
| Exemplary coding sequence for | 435 | CCGAAGAAGAAGAGAAGAGTC |
| alternate SV40 NLS | | |
| G024103 | 436 | mC*mA*mA*mGmUCUmGmUCmUGmCCUAUmUCACmCGAmGUUG |
| | | mUmAmGmCUCCCmU(L1)mCmCGUUmGmCUAmCAAU*AAGmGmCC |
| | | mGmUmC(L1)mGmAmUGUGCmCGmCAAmCGCUCUmGmCCGGCAU |
| | | CG*mU*mU |
| G024104 | 437 | mG*mG*mU*mGmAAUmAmGGmCAmGACAGmACUUmGUCmGUUG |
| | | mUmAmGmCUCCCmU(L1)mCmCGUUmGmCUAmCAAU*AAGmGmCC |
| | | mGmUmC(L1)mGmAmUGUGCmCGmCAAmCGCUCUmGmCC(L1)GGC |
| | | AUCG*mU*mU |
| G024108 | 438 | mG*mA*mU*mUmAAAmCmCCmGGmCCACUmUUCAmGGAmGUUG |
| | | mUmAmGmCUCCCmU(L1)mCmCGUUmGmCUAmCAAU*AAGmGmCC |
| | | mGmUmC(L1)mGmAmUGUGCmCGmCAAmCGCUCUmGmCC(L1)GGC |
| | | AUCG*mU*mU |
| G024109 | 439 | mC*mA*mG*mUmGACmAmAGmUCmUGUCUmGCCUmAUUmGUUG |
| | | mUmAmGmCUCCCmU(L1)mCmCGUUmGmCUAmCAAU*AAGmGmCC |
| | | mGmUmC(L1)mGmAmUGUGCmCGmCAAmCGCUCUmGmCC(L1)GGC |
| | | AUCG*mU*mU |
| G024110 | 440 | mG*mU*mU*mGmAAGmGmCGmUUmUGCACmAUGCmAAAmGUUG |
| | | mUmAmGmCUCCCmU(L1)mCmCGUUmGmCUAmCAAU*AAGmGmCC |
| | | mGmUmC(L1)mGmAmUGUGCmCGmCAAmCGCUCUmGmCC(L1)GGC |
| | | AUCG*mU*mU |
| G024111 | 441 | mU*mC*mC*mUmGUGmAmUGmUCmAAGCUmGGUCmGAGmGUUG |
| | | mUmAmGmCUCCCmU(L1)mCmCGUUmGmCUAmCAAU*AAGmGmCC |
| | | mGmUmC(L1)mGmAmUGUGCmCGmCAAmCGCUCUmGmCC(L1)GGC |
| | | AUCG*mU*mU |
| G024112 | 442 | mC*mA*mG*mGmUUUmUmGAmAAmGUUUAmGGUUmCGUmGUUG |
| | | mUmAmGmCUCCCmU(L1)mCmCGUUmGmCUAmCAAU*AAGmGmCC |
| | | mGmUmC(L1)mGmAmUGUGCmCGmCAAmCGCUCUmGmCC(L1)GGC |
| | | AUCG*mU*mU |
| G024113 | 443 | mA*mU*mC*mAmGAAmUmCCmUUmACUUUmGUGAmCACmGUUG |
| | | mUmAmGmCUCCCmU(L1)mCmCGUUmGmCUAmCAAU*AAGmGmCC |
| | | mGmUmC(L1)mGmAmUGUGCmCGmCAAmCGCUCUmGmCC(L1)GGC |
| | | AUCG*mU*mU |
| G024114 | 444 | mG*mA*mA*mGmUCCmAmUAmGAmCCUCAmUGUCmUAGmGUUG |
| | | mUmAmGmCUCCCmU(L1)mCmCGUUmGmCUAmCAAU*AAGmGmCC |
| | | mGmUmC(L1)mGmAmUGUGCmCGmCAAmCGCUCUmGmCC(L1)GGC |
| | | AUCG*mU*mU |
| G028844 | 445 | mU*mG*mU*mCmUGCmCmUAmUUmCACCGmAUUUmUGAmGUUG |
| | | mUmAmGmCUCCCmUmGmAmAmAmCmCGUUmGmCUAmCAAU*AA |
| | | GmGmCCmGmUmCmGmAmAmAmGmAmUGUGCmCGmCAAmCGCU |
| | | CUmGmCCmUmUmCmUGGCAUCG*mU*mU |
| G028845 | 446 | mU*mG*mC*mCmUAUmUmCAmCCmGAUUUmUGAUmUCUmGUUG |
| | | mUmAmGmCUCCCmUmGmAmAmAmCmCGUUmGmCUAmCAAU*AA |
| | | GmGmCCmGmUmCmGmAmAmAmGmAmUGUGCmCGmCAAmCGCU |
| | | CUmGmCCmUmUmCmUGGCAUCG*mU*mU |
| G028846 | 447 | mC*mG*mA*mUmUUUmGmAUmUCmUCAAAmCAAAmUGUmGUUG |
| | | mUmAmGmCUCCCmUmGmAmAmAmCmCGUUmGmCUAmCAAU*AA |
| | | GmGmCCmGmUmCmGmAmAmAmGmAmUGUGCmCGmCAAmCGCU |
| | | CUmGmCCmUmUmCmUGGCAUCG*U*mU |
| G028847 | 448 | mG*mU*mA*mAmGGAmUmUCmUGmAUGUGmUAUAmUCAmGUUG |
| | | mUmAmGmCUCCCmUmGmAmAmAmCmCGUUmGmCUAmCAAU*AA |
| | | GmGmCCmGmUmCmGmAmAmAmGmAmUGUGCmCGmCAAmCGCU |
| | | CUmGmCCmUmUmCmUGGCAUCG*mU*mU |
| G028848 | 449 | mA*mG*mA*mGmCAAmCmAGmUGmCUGUGmGCCUmGGAmGUUG |
| | | mUmAmGmCUCCCmUmGmAmAmAmCmCGUUmGmCUAmCAAU*AA |
| | | GmGmCCmGmUmCmGmAmAmAmGmAmUGUGCmCGmCAAmCGCU |
| | | CUmGmCCmUmUmCmUGGCAUCG*mU*mU |
| G028849 | 450 | mU*mG*mG*mAmGCAmAmCAmAAmUCUGAmCUUUmGCAmGUUG |
| | | mUmAmGmCUCCCmUmGmAmAmAmCmCGUUmGmCUAmCAAU*AA |
| | | GmGmCCmGmUmCmGmAmAmAmGmAmUGUGCmCGmCAAmCGCU |
| | | CUmGmCCmUmUmCmUGGCAUCG*mU*mU |
| G028850 | 451 | mA*mU*mG*mCmUGUmUmGUmUGmAAGGCmGUUUmGCAmGUUG |
| | | mUmAmGmCUCCCmUmGmAmAmAmCmCGUUmGmCUAmCAAU*AA |
| | | GmGmCCmGmUmCmGmAmAmAmGmAmUGUGCmCGmCAAmCGCU |
| | | CUmGmCCmUmUmCmUGGCAUCG*mU*mU |
| G028851 | 452 | mU*mU*mU*mUmGAAmAmGUmUUmAGGUUmCGUAmUCUmGUUG |
| | | mUmAmGmCUCCCmUmGmAmAmAmCmCGUUmGmCUAmCAAU*AA |
| | | GmGmCCmGmUmCmGmAmAmAmGmAmUGUGCmCGmCAAmCGCU |
| | | CUmGmCCmUmUmCmUGGCAUCG*mU*mU |
| G028852 | 453 | mU*mU*mA*mCmUUUmGmUGmACmACAUUmUGUUmUGAmGUUG |
| | | mUmAmGmCUCCCmUmGmAmAmAmCmCGUUmGmCUAmCAAU*AA |
| | | GmGmCCmGmUmCmGmAmAmAmGmAmUGUGCmCGmCAAmCGCU |
| | | CUmGmCCmUmUmCmUGGCAUCG*mU*mU |
| G028853 | 454 | mG*mA*mU*mUmAAAmCmCCmGGmCCACUmUUCAmGGAmGUUG |
| | | mUmAmGmCUCCCmUmGmAmAmAmCmCGUUmGmCUAmCAAU*AA |
| | | GmGmCCmGmUmCmGmAmAmAmGmAmUGUGCmCGmCAAmCGCU |
| | | CUmGmCCmUmUmCmUGGCAUCG*mU*mU |
| G021469 | 455 | mA*mU*mA*mUmCCAmGmAAmCCmCUGACmCCUGmCCGmGUUGm |
| | | UmAmGmCUCCCmUmGmAmAmAmCmCGUUmGmCUAmCAAU*AAG |
| | | mGmCCmGmUmCmGmAmAmAmGmAmUGUGCmCGmCAAmCGCUC |
| | | UmGmCCmUmUmCmUGGCAUCG*mU*mU |
| G024739 | 456 | mA*mG*mG*mAmCCAmGmCCmUCmAGACAmCAAAmUACmGUUG |
| | | mUmAmGmCUCCCmUmGmAmAmAmCmCGUUmGmCUAmCAAU*AA |
| | | GmGmCCmGmUmCmGmAmAmAmGmAmUGUGCmCGmCAAmCGCU |
| | | CUmGmCCmUmUmCmUGGCAUCG*mU*mU |
| G024741 | 457 | mC*mU*mG*mCmCUCmGmGAmCGmGCAUCmUAGAmACUmGUUG |
| | | mUmAmGmCUCCCmUmGmAmAmAmCmCGUUmGmCUAmCAAU*AA |
| | | GmGmCCmGmUmCmGmAmAmAmGmAmUGUGCmCGmCAAmCGCU |
| | | CUmGmCCmUmUmCmUGGCAUCG*mU*mU |
| G024743 | 458 | mA*mG*mG*mCmAGAmGmGAmGGmAGCAGmACGAmUGAmGUUG |
| | | mUmAmGmCUCCCmUmGmAmAmAmCmCGUUmGmCUAmCAAU*AA |
| | | GmGmCCmGmUmCmGmAmAmAmGmAmUGUGCmCGmCAAmCGCU |
| | | CUmGmCCmUmUmCmUGGCAUCG*mU*mU |
| | 459- | Not Used |
| | 499 | |
| Wild-type NmeCas9 guide RNA | 500 | NNNNNNNNNNNNNNNNNNNNNNNNGUUGUAGCUCCCUUUCUCAUUUC |
| | | GGAAACGAAAUGAGAACCGUUGCUACAAUAAGGCCGUCUGAAAAGAU |
| | | GUGCCGCAACGCUCUGCCCCUUAAAGCUUCUGCUUUAAGGGGCAUCG |
| | | UUUA |
| Shortened/unmodified NmeCas9 guide | 501 | (N)₂₀₋₂₅ |
| RNA | | GUUGUAGCUCCCUGAAACCGUUGCUACAAUAAGGCCGUCGAAAGAUG |
| | | UGCCGCAACGCUCUGCCUUCUGGCAUCGUU |
| Shortened/unmodified NmeCas9 guide | 502 | (N)₂₀₋₂₅ |
| RNA | | GUUGUAGCUCCCUGAAACCGUUGCUACAAUAAGGCCGUCGAAAGAUG |
| | | UGCCGCAACGCUCUGCCUUCUGGCAUCGUUUAUU |
| Shortened/unmodified NmeCas9 guide | 503 | (N)₂₀₋₂₅ |
| RNA | | GUUGUAGCUCCCUGGAAACCCGUUGCUACAAUAAGGCCGUCGAAAGA |
| | | UGUGCCGCAACGCUCUGCCUUCUGGCAUCGUUUAUU |
| Mod-N77 conserved portion only | 504 | mGUUGmUmAmGmCUCCCmUmGmAmAmAmCmCGUUmGmCUAmCAAU*A |
| | | AGmGmCCmGmUmCmGmAmAmAmGmAmUGUGCmCGCmAmAmCmGCUCU |
| | | mGmCCmUmUmCmUGmGCmAmUC*mG*mU*mU |
| Mod-N78 conserved portion only | 505 | mGUUGmUmAmGmCUCCCmUmGmAmAmAmCmCGUUmGmCUAmCAAU*A |
| | | AGmGmCCmGmUmCmGmAmAmAmGmAmUGUGCmCGmCAAmCGCUCUmG |
| | | mCCmUmUmCmUGGCAUCG*mU*mU |
| Shortened/unmodified NmeCas9 guide | 506 | (N)₂₀₋₂₅ |
| RNA comprising linkers | | mGUUGUAGCUCCCUUC(L1)GACCGUUGCUACAAUAAGGCCGUC(L1) |
| | | GAUGUGCCGCAACGCUCUGCC(L1)GGCAUCGUU |
| Shortened/modified NmeCas9 guide | 507 | mN*mN*mN*mNmNNNmNmNNmNNmNNNNNmNNNNmNNNmGUUGmUmA |
| RNA comprising linkers | | mGmCUCCCmUmUmC(L1)mGmAmCmCGUUmGmCUAmCAAU*AAGmGm |
| | | CCmGmUmC(L1)mGmAmUGUGCmCGmCAAmCGCUCUmGmCC(L1)GG |
| | | CAUCG*mU*mU |
| Shortened/modified NmeCas9 guide | 508 | mN*mNNNNNNNNmNNNmNNNNNNNNNNNNmGUUGmUmAmGmCUCCCm |
| RNA | | UmGmAmAmAmCmCGUUmGmCUAmCAAU*AAGmGmCCmGmUmCmGmAm |
| | | AmAmGmAmUGUGCmCGCmAmAmCmGCUCUmGmCCmUmUmCmUGmGCm |
| | | AmUC*mG*mU*mU |
| G024739 unmodified sequence | 509 | AGGACCAGCCUCAGACACAAAUACGUUGUAGCUCCCUGAAACCGUUG |
| | | CUACAAUAAGGCCGUCGAAAGAUGUGCCGCAACGCUCUGCCUUCUGG |
| | | CAUCGUU |
| G024741 unmodified sequence | 510 | CUGCCUCGGACGGCAUCUAGAACUGUUGUAGCUCCCUGAAACCGUUG |
| | | CUACAAUAAGGCCGUCGAAAGAUGUGCCGCAACGCUCUGCCUUCUGG |
| | | CAUCGUU |
| G024743 unmodified sequence | 511 | AGGCAGAGGAGGAGCAGACGAUGAGUUGUAGCUCCCUGAAACCGUUG |
| | | CUACAAUAAGGCCGUCGAAAGAUGUGCCGCAACGCUCUGCCUUCUGG |
| | | CAUCGUU |
| G021536 Mod-N78 Nme Cas9 guide RNA | 512 | mN*mN*mN*mNmNNNmNmNNmNNmNNNNNmNNNNmNNNmGUUGmUmA |
| (101) | | mGmCUCCCmUmGmAmAmAmCmCGUUmGmCUAmCAAU*AAGmGmCCmG |
| | | mUmCmGmAmAmAmGmAmUGUGCmCGmCAAmCGCUCUmGmCCmUmUmC |
| | | mUGGCAUCG*mU*mU |
| G027492 Shortened Nme Cas9 guide | 513 | GUUGUAGCUCCCUUCGAAAGACCGUUGCUACAAUAAGGCCGUCGAAA |
| RNA (105) conserved portion only | | GAUGUGCCGCAACGCUCUGCCUUCUGGCAUCGUU |
| G027492 Shortened Cas9 guide RNA | 514 | (N)₂₀₋₂₅ |
| (105) | | GUUGUAGCUCCCUUCGAAAGACCGUUGCUACAAUAAGGCCGUCGAAA |
| | | GAUGUGCCGCAACGCUCUGCCUUCUGGCAUCGUU |
| G027492 Mod-N78 Nme Cas9 guide RNA | 515 | mGUUGmUmAmGmCUCCCmUmUmCmGmAmAmAmGmAmCmCGUUmGmCU |
| (105) conserved portion only | | AmCAAU*AAGmGmCCmGmUmCmGmAmAmAmGmAmUGUGCmCGmCAAm |
| | | CGCUCUmGmCCmUmUmCmUGGCAUCG*mU*mU |
| G027492 Mod-N78 Nme Cas9 guide RNA | 516 | mN*mN*mN*mNmNNNmNmNNmNNmNNNNNmNNNNmNNNmGUUGmUmA |
| (105) | | mGmCUCCCmUmUmCmGmAmAmAmGmAmCmCGUUmGmCUAmCAAU*AA |
| | | GmGmCCmGmUmCmGmAmAmAmGmAmUGUGCmCGmCAAmCGCUCUmGm |
| | | CCmUmUmCmUGGCAUCG*mU*mU |
| Exemplary sgRNA | 517 | mN*mNNNNNNNNmNNNmNNNNNNNNNNNNmGUUGmUmAmGmCUCCCm |
| | | UmGmAmAmAmCmCGUUmGmCUAmCAAUAAGmGmCCmGmUmCmGmAmA |
| | | mAmGmAmUGUGCmCGCmAmAmCmGCUCUmGmCCmUmUmCmUGmGCmA |
| | | mUC*mG*mU*mU |
| Exemplary sgRNA | 518 | mN*mNNNNNNNNmNNNmNNNNNNNNNNNNmGUUGmUmAmGmCUCCCm |
| | | UmGmAmAmAmCmCGUUmGmCUAmCAAU*AAGmGmCCmGmUmCmGmAm |
| | | AmAmGmAmUGUGCmCGCmAmAmCmGmCmUmCmUmGmCCmUmUmCmUG |
| | | mGCmAmUC*mG*mU*mU |
| Exemplary sgRNA | 519 | mN*mNNNNNNNNmNNNmNNNNNNNNNNNNmGUUGmUmAmGmCUCCCm |
| | | UmGmAmAmAmCmCGUUmGmCUAmCAAUAAGmGmCCmGmUmCmGmAmA |
| | | mAmGmAmUGUGCmCGCmAmAmCmGmCmUmCmUmGmCCmUmUmCmUGm |
| | | GCmAmUC*mG*mU*mU |
| Exemplary sgRNA | 520 | mN*mN*mN*mNmNNNmNmNNmNNmNNNNNmNNNNmNNNmGUUGmUmA |
| | | mGmCUCCCmUmUmCmGmAmAmAmGmAmCmCGUUmGmCUAmCAAUAAG |
| | | mGmCCmGmUmCmGmAmAmAmGmAmUGUGCmCGmCAAmCGCUCUmGmC |
| | | CmUmUmCmUGGCAUCG*mU*mU |
| Exemplary sgRNA | 521 | mN*mN*mN*mNmNNNmNmNNmNNmNNNNNmNNNNmNNNmGUUGmUmA |
| | | mGmCUCCCmUmUmCmGmAmAmAmGmAmCmCGUUmGmCUAmCAAU*AA |
| | | GmGmCCmGmUmCmGmAmAmAmGmAmUGUGCmCGmCAAmCGmCmUmCm |
| | | UmGmCCmUmUmCmUGGCAUCG*mU*mU |
| Exemplary sgRNA | 522 | mN*mN*mN*mNmNNNmNmNNmNNmNNNNNmNNNNmNNNmGUUGmUmA |
| | | mGmCUCCCmUmUmCmGmAmAmAmGmAmCmCGUUmGmCUAmCAAUAAG |
| | | mGmCCmGmUmCmGmAmAmAmGmAmUGUGCmCGmCAAmCGmCmUmCmU |
| | | mGmCCmUmUmCmUGGCAUCG*mU*mU |
| Exemplary sgRNA | 523 | (N)₂₀₋₂₅ |
| | | mGUUGmUmAmGmCUCCCmUmGmAmAmAmCmCGUUmGmCUAmCAAUAA |
| | | GmGmCCmGmUmCmGmAmAmAmGmAmUGUGCmCGCmAmAmCmGmCmUm |
| | | CmUmGmCCmUmUmCmUGmGCmAmUC*mG*mU*mU |
| Exemplary sgRNA | 524 | (N)2₀₋₂₅ |
| | | mGUUGmUmAmGmCUCCCmUmUmCmGmAmAmAmGmAmCmCGUUmGmCU |
| | | AmCAAUAAGmGmCCmGmUmCmGmAmAmAmGmAmUGUGCmCGmCAAmC |
| | | GmCmUmCmUmGmCCmUmUmCmUGGCAUCG*mU*mU |
| Exemplary sgRNA | 525 | mN*mN*mN*mNmNNNmNmNNmNNmNNNNNmNNNNmNNNmGUUG |
| | | mUmAmGmCUCCCmUmGmAmAmAmCmCGUUmGmCUAmCAAUAA |
| | | GmGmCCmGmUmCmGmAmAmAmGmAmUGUGCmCGmCAAmCGCU |
| | | CUmGmCCmUmUmCmUGGCAUCG*mU*mU |
| Exemplary sgRNA | 526 | mN*mN*mN*mNmNNNmNmNNmNNmNNNNNmNNNNmNNNmGUUG |
| | | mUmAmGmCUCCCmUmGmAmAmAmCmCGUUmGmCUAmCAAU*AA |
| | | GmGmCCmGmUmCmGmAmAmAmGmAmUGUGCmCGmCAAmCGmC |
| | | mUmCmUmGmCCmUmUmCmUGGCAUCG*mU*mU |
| Exemplary sgRNA | 527 | mN*mN*mN*mNmNNNmNmNNmNNmNNNNNmNNNNmNNNmGUUG |
| | | mUmAmGmCUCCCmUmGmAmAmAmCmCGUUmGmCUAmCAAUAA |
| | | GmGmCCmGmUmCmGmAmAmAmGmAmUGUGCmCGmCAAmCGmC |
| | | mUmCmUmGmCCmUmUmCmUGGCAUCG*mU*mU |
| Exemplary sgRNA (G032572; 101-mer | 528 | Mc*Mc*Ma*mAmGUGmUmCUmUCmCAGUAmCGAUmUUGmGUUGmUmA |
| as shown in FIG. 34) | | mGmCUCCCmUmGmAmAmAmCmCGUUmGmCUAmCAAUAAGmGmCCmGm |
| | | UmCmGmAmAmAmGmAmUGUGCmCGmCAAmCGmCmUmCmUmGmCCmUm |
| | | UmCmUGGCAUCG*Mu*Mu |
| Exemplary sgRNA (G031771; 105-mer | 529 | mC*mC*mA*mAmGUGmUmCUmUCmCAGUAmCGAUmUUGmGUUGmUmA |
| as shown in FIG. 35) | | mGmCUCCCmUmUmCmGmAmAmAmGmAmCmCGUUmGmCUAmCAAU |
| | | AAGmGmCCmGmUmCmGmAmAmAmGmAmUGUGCmCGmCAAmCGmCmUm |
| | | CmUmGmCCmUmUmCmUGGCAUCG*mU*mU |
| G020073 | 530 | mG*mUGUGUCCCmUCUmCCCCACCCGUCCmGUUGmUmAmGmCUCCCm |
| | | UmGmAmAmAmCmCGUUmGmCUAmCAAU*AAGmGmCCmGmUmCmGmAm |
| | | AmAmGmAmUGUGCmCGCAACGCUCUmGmCCmUmUmCmUGGCAUCGmU |
| | | *mU |
| G027492 | 531 | mC*mC*mA*mAmGUGmUmCUmUCmCAGUAmCGAUmUUGmGUUGmUmA |
| | | mGmCUCCCmUmUmCmGmAmAmAmGmAmCmCGUUmGmCUAmCAAU*AA |
| | | GmGmCCmGmUmCmGmAmAmAmGmAmUGUGCmCGmCAAmCGCUCUmGm |
| | | CCmUmUmCmUGGCAUCG*mU*mU |
| G027493 | 532 | mC*mC*mA*mAmGUGmUmCUmUCmCAGUAmCGAUmUUGmGUUGmUmAmGmCU |
| | | CCCmUmUmCmGmAmAmAmGmAmCmCGUUmGmCUAmCAAU*AAGmGmCCmGmU |
| | | mGmAmAmAmAmUGUGCmCGmCAAmCGCUCUmGmCCmUmUmCmUGGCAUCG*m |
| | | U*mU |
| G027494 | 533 | mC*mC*mA*mAmGUGmUmCUmUCmCAGUAmCGAUmUUGmGUUGmUmAmGmCU |
| | | CCCmUmUmCmGmAmAmAmGmAmCmCGUUmGmCUAmCAAU*AAGmGmCCmGmG |
| | | mAmAmAmUGUGCmCGmCAAmCGCUCUmGmCCmUmUmCmUGGCAUCG*mU*mU |
| G027495 | 534 | mC*mC*mA*mAmGUGmUmCUmUCmCAGUAmCGAUmUUGmGUUGmUmAmGmCU |
| | | CCCmUmUmCmGmAmAmAmGmAmCmCGUUmGmCUAmCAAU*AAGmGmCCmGmA |
| | | mAmAGUGCmCGmCAAmCGCUCUmGmCCmUmUmCmUGGCAUCG*mU*mU |
| G027496 | 535 | mC*mC*mA*mAmGUGmUmCUmUCmCAGUAmCGAUmUUGmGUUGmUmAmGmCU |
| | | CCCmUmGmAmAmAmCmCGUUmGmCUAmCAAU*AAGmGmCCmGmAmAmAGUGC |
| | | mCGmCAAmCGCUCUmGmCCmUmUmCmUGGCAUCG*mU*mU |

The application's sequence listing, which the Patent Office published only in electronic form, follows.

SEQUENCE LISTING (535 sequences)

SEQ ID NO: 1 - protein, 1105 aa, synthetic construct
  REGION 1..1105: note = Synthetic
MTGAAFKPNPINYILGLDIGIASVGWAMVEIDEEENPIRLIDLGVRVFERAEVPKTGDSLAMARRLARSVRRLTRRRAHRLLRARRLLKREGVLQAADFDENGLIKSLPNTPWQLRAAALDRKLTPLEWSAVLLHLIKHRGYLSQRKNEGETADKELGALLKGVANNAHALQTGDFRTPAELALNKFEKESGHIRNQRGDYSHTFSRKDLQAELILLFEKQKEFGNPHVSGGLKEGIETLLMTQRPALSGDAVQKMLGHCTFEPAEPKAAKNTYTAERFIWLTKLNNLRILEQGSERPLTDTERATLMDEPYRKSKLTYAQARKLLGLEDTAFFKGLRYGKDNAEASTLMEMKAYHAISRALEKEGLKDKKSPLNLSSELQDEIGTAFSLFKTDEDITGRLKDRVQPEILEALLKHISFDKFVQISLKALRRIVPLMEQGKRYDEACAEIYGDHYGKKNTEEKIYLPPIPADEIRNPVVLRALSQARKVINGVVRRYGSPARIHIETAREVGKSFKDRKEIEKRQEENRKDREKAAAKFREYFPNFVGEPKSKDILKLRLYEQQHGKCLYSGKEINLVRLNEKGYVEIDHALPFSRTWDDSFNNKVLVLGSENQNKGNQTPYEYFNGKDNSREWQEFKARVETSRFPRSKKQRILLQKFDEDGFKECNLNDTRYVNRFLCQFVADHILLTGKGKRRVFASNGQITNLLRGFWGLRKVRAENDRHHALDAVVVACSTVAMQQKITRFVRYKEMNAFDGKTIDKETGKVLHQKTHFPQPWEFFAQEVMIRVFGKPDGKPEFEEADTPEKLRTLLAEKLSSRPEAVHEYVTPLFVSRAPNRKMSGAHKDTLRSAKRFVKHNEKISVKRVWLTEIKLADLENMVNYKNGREIELYEALKARLEAYGGNAKQAFDPKDNPFYKKGGQLVKAVRVEKTQESGVLLNKKNAYTIADNGDMVRVDVFCKVDKKGKNQYFIVPIYAWQVAENILPDIDCKGYRIDDSYTFCFSLHKYDLIAFQKDEKSKVEFAYYINCDSSNGRFYLAWHDKGSKEQQFRISTQNLVLIQKYQVNELGKEIRPCRLKKRPPVRSGKRTADGSEFESPKKKRKVE

SEQ ID NO: 2 - protein, 1593 aa, synthetic construct
  REGION 1..1593: note = Synthetic
MEASPASGPRHLMDPHIFTSNFNNGIGRHKTYLCYEVERLDNGTSVKMDQHRGFLHNQAKNLLCGFYGRHAELRFLDLVPSLQLDPAQIYRVTWFISWSPCFSWGCAGEVRAFLQENTHVRLRIFAARIYDYDPLYKEALQMLRDAGAQVSIMTYDEFKHCWDTFVDHQGCPFQPWDGLDEHSQALSGRLRAILQNQGNSGSETPGTSESATPESDKKYSIGLAIGTNSVGWAVITDEYKVPSKKFKVLGNTDRHSIKKNLIGALLFDSGETAEATRLKRTARRRYTRRKNRICYLQEIFSNEMAKVDDSFFHRLEESFLVEEDKKHERHPIFGNIVDEVAYHEKYPTIYHLRKKLVDSTDKADLRLIYLALAHMIKFRGHFLIEGDLNPDNSDVDKLFIQLVQTYNQLFEENPINASGVDAKAILSARLSKSRRLENLIAQLPGEKKNGLFGNLIALSLGLTPNFKSNFDLAEDAKLQLSKDTYDDDLDNLLAQIGDQYADLFLAAKNLSDAILLSDILRVNTEITKAPLSASMIKRYDEHHQDLTLLKALVRQQLPEKYKEIFFDQSKNGYAGYIDGGASQEEFYKFIKPILEKMDGTEELLVKLNREDLLRKQRTFDNGSIPHQIHLGELHAILRRQEDFYPFLKDNREKIEKILTFRIPYYVGPLARGNSRFAWMTRKSEETITPWNFEEVVDKGASAQSFIERMTNFDKNLPNEKVLPKHSLLYEYFTVYNELTKVKYVTEGMRKPAFLSGEQKKAIVDLLFKTNRKVTVKQLKEDYFKKIECFDSVEISGVEDRFNASLGTYHDLLKIIKDKDFLDNEENEDILEDIVLTLTLFEDREMIEERLKTYAHLFDDKVMKQLKRRRYTGWGRLSRKLINGIRDKQSGKTILDFLKSDGFANRNFMQLIHDDSLTFKEDIQKAQVSGQGDSLHEHIANLAGSPAIKKGILQTVKVVDELVKVMGRHKPENIVIEMARENQTTQKGQKNSRERMKRIEEGIKELGSQILKEHPVENTQLQNEKLYLYYLQNGRDMYVDQELDINRLSDYDVDHIVPQSFLKDDSIDNKVLTRSDKNRGKSDNVPSEEVVKKMKNYWRQLLNAKLITQRKFDNLTKAERGGLSELDKAGFIKRQLVETRQITKHVAQILDSRMNTKYDENDKLIREVKVITLKSKLVSDFRKDFQFYKVREINNYHHAHDAYLNAVVGTALIKKYPKLESEFVYGDYKVYDVRKMIAKSEQEIGKATAKYFFYSNIMNFFKTEITLANGEIRKRPLIETNGETGEIVWDKGRDFATVRKVLSMPQVNIVKKTEVQTGGFSKESILPKRNSDKLIARKKDWDPKKYGGFDSPTVAYSVLVVAKVEKGKSKKLKSVKELLGITIMERSSFEKNPIDFLEAKGYKEVKKDLIIKLPKYSLFELENGRKRMLASAGELQKGNELALPSKYVNFLYLASHYEKLKGSPEDNEQKQLFVEQHKHYLDEIIEQISEFSKRVILADANLDKVLSAYNKHRDKPIREQAENIIHLFTLTNLGAPAAFKYFDTTIDRKRYTSTKEVLDATLIHQSITGLYETRIDLSQLGGDGGGSPKKKRKV

SEQ ID NO: 3 - protein, 107 aa, synthetic construct
  REGION 1..107: note = Synthetic
MTNLSDIIEKETGKQLVIQESILMLPEEVEEVIGNKPESDILVHTAYDESTDENVMLLTSDAPEYKPWALVIQDSNGENKIKMLSGGSKRTADGSEFESPKKKRKVE

SEQ ID NO: 4 - protein, 1097 aa, synthetic construct
  REGION 1..1097: note = Synthetic
MAAFKPNPINYILGLDIGIASVGWAMVEIDEEENPIRLIDLGVRVFERAEVPKTGDSLAMARRLARSVRRLTRRRAHRLLRARRLLKREGVLQAADFDENGLIKSLPNTPWQLRAAALDRKLTPLEWSAVLLHLIKHRGYLSQRKNEGETADKELGALLKGVANNAHALQTGDFRTPAELALNKFEKESGHIRNQRGDYSHTFSRKDLQAELILLFEKQKEFGNPHVSGGLKEGIETLLMTQRPALSGDAVQKMLGHCTFEPAEPKAAKNTYTAERFIWLTKLNNLRILEQGSERPLTDTERATLMDEPYRKSKLTYAQARKLLGLEDTAFFKGLRYGKDNAEASTLMEMKAYHAISRALEKEGLKDKKSPLNLSSELQDEIGTAFSLFKTDEDITGRLKDRVQPEILEALLKHISFDKFVQISLKALRRIVPLMEQGKRYDEACAEIYGDHYGKKNTEEKIYLPPIPADEIRNPVVLRALSQARKVINGVVRRYGSPARIHIETAREVGKSFKDRKEIEKRQEENRKDREKAAAKFREYFPNFVGEPKSKDILKLRLYEQQHGKCLYSGKEINLVRLNEKGYVEIDHALPFSRTWDDSFNNKVLVLGSENQNKGNQTPYEYFNGKDNSREWQEFKARVETSRFPRSKKQRILLQKFDEDGFKECNLNDTRYVNRFLCQFVADHILLTGKGKRRVFASNGQITNLLRGFWGLRKVRAENDRHHALDAVVVACSTVAMQQKITRFVRYKEMNAFDGKTIDKETGKVLHQKTHFPQPWEFFAQEVMIRVFGKPDGKPEFEEADTPEKLRTLLAEKLSSRPEAVHEYVTPLFVSRAPNRKMSGAHKDTLRSAKRFVKHNEKISVKRVWLTEIKLADLENMVNYKNGREIELYEALKARLEAYGGNAKQAFDPKDNPFYKKGGQLVKAVRVEKTQESGVLLNKKNAYTIADNGDMVRVDVFCKVDKSGGGSPKKKRKVSGGSGKNQYFIVPIYAWQVAENILPDIDCKGYRIDDSYTFCFSLHKYDLIAFQKDEKSKVEFAYYINCDSSNGRFYLAWHDKGSKEQQFRISTQNLVLIQKYQVNELGKEIRPCRLKKRPPVR

SEQ ID NO: 5 - protein, 1110 aa, synthetic construct
  REGION 1..1110: note = Synthetic
MVPKKKRKVAAFKPNPINYILGLDIGIASVGWAMVEIDEEENPIRLIDLGVRVFERAEVPKTGDSLAMARRLARSVRRLTRRRAHRLLRARRLLKREGVLQAADFDENGLIKSLPNTPWQLRAAALDRKLTPLEWSAVLLHLIKHRGYLSQRKNEGETADKELGALLKGVANNAHALQTGDFRTPAELALNKFEKESGHIRNQRGDYSHTFSRKDLQAELILLFEKQKEFGNPHVSGGLKEGIETLLMTQRPALSGDAVQKMLGHCTFEPAEPKAAKNTYTAERFIWLTKLNNLRILEQGSERPLTDTERATLMDEPYRKSKLTYAQARKLLGLEDTAFFKGLRYGKDNAEASTLMEMKAYHAISRALEKEGLKDKKSPLNLSSELQDEIGTAFSLFKTDEDITGRLKDRVQPEILEALLKHISFDKFVQISLKALRRIVPLMEQGKRYDEACAEIYGDHYGKKNTEEKIYLPPIPADEIRNPVVLRALSQARKVINGVVRRYGSPARIHIETAREVGKSFKDRKEIEKRQEENRKDREKAAAKFREYFPNFVGEPKSKDILKLRLYEQQHGKCLYSGKEINLVRLNEKGYVEIDHALPFSRTWDDSFNNKVLVLGSENQNKGNQTPYEYFNGKDNSREWQEFKARVETSRFPRSKKQRILLQKFDEDGFKECNLNDTRYVNRFLCQFVADHILLTGKGKRRVFASNGQITNLLRGFWGLRKVRAENDRHHALDAVVVACSTVAMQQKITRFVRYKEMNAFDGKTIDKETGKVLHQKTHFPQPWEFFAQEVMIRVFGKPDGKPEFEEADTPEKLRTLLAEKLSSRPEAVHEYVTPLFVSRAPNRKMSGAHKDTLRSAKRFVKHNEKISVKRVWLTEIKLADLENMVNYKNGREIELYEALKARLEAYGGNAKQAFDPKDNPFYKKGGQLVKAVRVEKTQESGVLLNKKNAYTIADNGDMVRVDVFCKVDKKGKNQYFIVPIYAWQVAENILPDIDCKGYRIDDSYTFCFSLHKYDLIAFQKDEKSKVEFAYYINCDSSNGRFYLAWHDKGSKEQQFRISTQNLVLIQKYQVNELGKEIRPCRLKKRPPVRYPYDVPDYAAAPAAKKKKLD

SEQ ID NO: 6 - protein, 1082 aa, synthetic construct
  REGION 1..1082: note = Synthetic
MAAFKPNPINYILGLDIGIASVGWAMVEIDEEENPIRLIDLGVRVFERAEVPKTGDSLAMARRLARSVRRLTRRRAHRLLRARRLLKREGVLQAADFDENGLIKSLPNTPWQLRAAALDRKLTPLEWSAVLLHLIKHRGYLSQRKNEGETADKELGALLKGVANNAHALQTGDFRTPAELALNKFEKESGHIRNQRGDYSHTFSRKDLQAELILLFEKQKEFGNPHVSGGLKEGIETLLMTQRPALSGDAVQKMLGHCTFEPAEPKAAKNTYTAERFIWLTKLNNLRILEQGSERPLTDTERATLMDEPYRKSKLTYAQARKLLGLEDTAFFKGLRYGKDNAEASTLMEMKAYHAISRALEKEGLKDKKSPLNLSSELQDEIGTAFSLFKTDEDITGRLKDRVQPEILEALLKHISFDKFVQISLKALRRIVPLMEQGKRYDEACAEIYGDHYGKKNTEEKIYLPPIPADEIRNPVVLRALSQARKVINGVVRRYGSPARIHIETAREVGKSFKDRKEIEKRQEENRKDREKAAAKFREYFPNFVGEPKSKDILKLRLYEQQHGKCLYSGKEINLVRLNEKGYVEIDHALPFSRTWDDSFNNKVLVLGSENQNKGNQTPYEYFNGKDNSREWQEFKARVETSRFPRSKKQRILLQKFDEDGFKECNLNDTRYVNRFLCQFVADHILLTGKGKRRVFASNGQITNLLRGFWGLRKVRAENDRHHALDAVVVACSTVAMQQKITRFVRYKEMNAFDGKTIDKETGKVLHQKTHFPQPWEFFAQEVMIRVFGKPDGKPEFEEADTPEKLRTLLAEKLSSRPEAVHEYVTPLFVSRAPNRKMSGAHKDTLRSAKRFVKHNEKISVKRVWLTEIKLADLENMVNYKNGREIELYEALKARLEAYGGNAKQAFDPKDNPFYKKGGQLVKAVRVEKTQESGVLLNKKNAYTIADNGDMVRVDVFCKVDKKGKNQYFIVPIYAWQVAENILPDIDCKGYRIDDSYTFCFSLHKYDLIAFQKDEKSKVEFAYYINCDSSNGRFYLAWHDKGSKEQQFRISTQNLVLIQKYQVNELGKEIRPCRLKKRPPVR

SEQ ID NO: 7 - protein, 1082 aa, synthetic construct; identical to SEQ ID NO: 6
  REGION 1..1082: note = Synthetic

SEQ ID NO: 8 - protein, 1102 aa, synthetic construct
  REGION 1..1102: note = Synthetic
MDGSGGGSPKKKRKVGGSGGGAAFKPNPINYILGLDIGIASVGWAMVEIDEEENPIRLIDLGVRVFERAEVPKTGDSLAMARRLARSVRRLTRRRAHRLLRARRLLKREGVLQAADFDENGLIKSLPNTPWQLRAAALDRKLTPLEWSAVLLHLIKHRGYLSQRKNEGETADKELGALLKGVANNAHALQTGDFRTPAELALNKFEKESGHIRNQRGDYSHTFSRKDLQAELILLFEKQKEFGNPHVSGGLKEGIETLLMTQRPALSGDAVQKMLGHCTFEPAEPKAAKNTYTAERFIWLTKLNNLRILEQGSERPLTDTERATLMDEPYRKSKLTYAQARKLLGLEDTAFFKGLRYGKDNAEASTLMEMKAYHAISRALEKEGLKDKKSPLNLSSELQDEIGTAFSLFKTDEDITGRLKDRVQPEILEALLKHISFDKFVQISLKALRRIVPLMEQGKRYDEACAEIYGDHYGKKNTEEKIYLPPIPADEIRNPVVLRALSQARKVINGVVRRYGSPARIHIETAREVGKSFKDRKEIEKRQEENRKDREKAAAKFREYFPNFVGEPKSKDILKLRLYEQQHGKCLYSGKEINLVRLNEKGYVEIDHALPFSRTWDDSFNNKVLVLGSENQNKGNQTPYEYFNGKDNSREWQEFKARVETSRFPRSKKQRILLQKFDEDGFKECNLNDTRYVNRFLCQFVADHILLTGKGKRRVFASNGQITNLLRGFWGLRKVRAENDRHHALDAVVVACSTVAMQQKITRFVRYKEMNAFDGKTIDKETGKVLHQKTHFPQPWEFFAQEVMIRVFGKPDGKPEFEEADTPEKLRTLLAEKLSSRPEAVHEYVTPLFVSRAPNRKMSGAHKDTLRSAKRFVKHNEKISVKRVWLTEIKLADLENMVNYKNGREIELYEALKARLEAYGGNAKQAFDPKDNPFYKKGGQLVKAVRVEKTQESGVLLNKKNAYTIADNGDMVRVDVFCKVDKKGKNQYFIVPIYAWQVAENILPDIDCKGYRIDDSYTFCFSLHKYDLIAFQKDEKSKVEFAYYINCDSSNGRFYLAWHDKGSKEQQFRISTQNLVLIQKYQVNELGKEIRPCRLKKRPPVR

SEQ ID NO: 9 - protein, 1121 aa, synthetic construct
  REGION 1..1121: note = Synthetic
MDGSGGGSPKKKRKVGGSGGGAAFKPNPINYILGLDIGIASVGWAMVEIDEEENPIRLIDLGVRVFERAEVPKTGDSLAMARRLARSVRRLTRRRAHRLLRARRLLKREGVLQAADFDENGLIKSLPNTPWQLRAAALDRKLTPLEWSAVLLHLIKHRGYLSQRKNEGETADKELGALLKGVANNAHALQTGDFRTPAELALNKFEKESGHIRNQRGDYSHTFSRKDLQAELILLFEKQKEFGNPHVSGGLKEGIETLLMTQRPALSGDAVQKMLGHCTFEPAEPKAAKNTYTAERFIWLTKLNNLRILEQGSERPLTDTERATLMDEPYRKSKLTYAQARKLLGLEDTAFFKGLRYGKDNAEASTLMEMKAYHAISRALEKEGLKDKKSPLNLSSELQDEIGTAFSLFKTDEDITGRLKDRVQPEILEALLKHISFDKFVQISLKALRRIVPLMEQGKRYDEACAEIYGDHYGKKNTEEKIYLPPIPADEIRNPVVLRALSQARKVINGVVRRYGSPARIHIETAREVGKSFKDRKEIEKRQEENRKDREKAAAKFREYFPNFVGEPKSKDILKLRLYEQQHGKCLYSGKEINLVRLNEKGYVEIDHALPFSRTWDDSFNNKVLVLGSENQNKGNQTPYEYFNGKDNSREWQEFKARVETSRFPRSKKQRILLQKFDEDGFKECNLNDTRYVNRFLCQFVADHILLTGKGKRRVFASNGQITNLLRGFWGLRKVRAENDRHHALDAVVVACSTVAMQQKITRFVRYKEMNAFDGKTIDKETGKVLHQKTHFPQPWEFFAQEVMIRVFGKPDGKPEFEEADTPEKLRTLLAEKLSSRPEAVHEYVTPLFVSRAPNRKMSGAHKDTLRSAKRFVKHNEKISVKRVWLTEIKLADLENMVNYKNGREIELYEALKARLEAYGGNAKQAFDPKDNPFYKKGGQLVKAVRVEKTQESGVLLNKKNAYTIADNGDMVRVDVFCKVDKKGKNQYFIVPIYAWQVAENILPDIDCKGYRIDDSYTFCFSLHKYDLIAFQKDEKSKVEFAYYINCDSSNGRFYLAWHDKGSKEQQFRISTQNLVLIQKYQVNELGKEIRPCRLKKRPPVRSESATPESVSGWRLFKKIS

SEQ ID NO: 10 - protein, 1124 aa, synthetic construct
  REGION 1..1124: note = Synthetic
MDGSGGGSPKKKRKVGGSGGGAAFKPNPINYILGLDIGIASVGWAMVEIDEEENPIRLIDLGVRVFERAEVPKTGDSLAMARRLARSVRRLTRRRAHRLLRARRLLKREGVLQAADFDENGLIKSLPNTPWQLRAAALDRKLTPLEWSAVLLHLIKHRGYLSQRKNEGETADKELGALLKGVANNAHALQTGDFRTPAELALNKFEKESGHIRNQRGDYSHTFSRKDLQAELILLFEKQKEFGNPHVSGGLKEGIETLLMTQRPALSGDAVQKMLGHCTFEPAEPKAAKNTYTAERFIWLTKLNNLRILEQGSERPLTDTERATLMDEPYRKSKLTYAQARKLLGLEDTAFFKGLRYGKDNAEASTLMEMKAYHAISRALEKEGLKDKKSPLNLSSELQDEIGTAFSLFKTDEDITGRLKDRVQPEILEALLKHISFDKFVQISLKALRRIVPLMEQGKRYDEACAEIYGDHYGKKNTEEKIYLPPIPADEIRNPVVLRALSQARKVINGVVRRYGSPARIHIETAREVGKSFKDRKEIEKRQEENRKDREKAAAKFREYFPNFVGEPKSKDILKLRLYEQQHGKCLYSGKEINLVRLNEKGYVEIDHALPFSRTWDDSFNNKVLVLGSENQNKGNQTPYEYFNGKDNSREWQEFKARVETSRFPRSKKQRILLQKFDEDGFKECNLNDTRYVNRFLCQFVADHILLTGKGKRRVFASNGQITNLLRGFWGLRKVRAENDRHHALDAVVVACSTVAMQQKITRFVRYKEMNAFDGKTIDKETGKVLHQKTHFPQPWEFFAQEVMIRVFGKPDGKPEFEEADTPEKLRTLLAEKLSSRPEAVHEYVTPLFVSRAPNRKMSGAHKDTLRSAKRFVKHNEKISVKRVWLTEIKLADLENMVNYKNGREIELYEALKARLEAYGGNAKQAFDPKDNPFYKKGGQLVKAVRVEKTQESGVLLNKKNAYTIADNGDMVRVDVFCKVDKKGKNQYFIVPIYAWQVAENILPDIDCKGYRIDDSYTFCFSLHKYDLIAFQKDEKSKVEFAYYINCDSSNGRFYLAWHDKGSKEQQFRISTQNLVLIQKYQVNELGKEIRPCRLKKRPPVRSGKRTADGSGGGSPAAKKKKLD

SEQ ID NO: 11 - protein, 1120 aa, synthetic construct
  REGION 1..1120: note = Synthetic
MDGSGGGSPKKKRKVEDKRPAATKKAGQAKKKKGGSGGGAAFKPNPINYILGLDIGIASVGWAMVEIDEEENPIRLIDLGVRVFERAEVPKTGDSLAMARRLARSVRRLTRRRAHRLLRARRLLKREGVLQAADFDENGLIKSLPNTPWQLRAAALDRKLTPLEWSAVLLHLIKHRGYLSQRKNEGETADKELGALLKGVANNAHALQTGDFRTPAELALNKFEKESGHIRNQRGDYSHTFSRKDLQAELILLFEKQKEFGNPHVSGGLKEGIETLLMTQRPALSGDAVQKMLGHCTFEPAEPKAAKNTYTAERFIWLTKLNNLRILEQGSERPLTDTERATLMDEPYRKSKLTYAQARKLLGLEDTAFFKGLRYGKDNAEASTLMEMKAYHAISRALEKEGLKDKKSPLNLSSELQDEIGTAFSLFKTDEDITGRLKDRVQPEILEALLKHISFDKFVQISLKALRRIVPLMEQGKRYDEACAEIYGDHYGKKNTEEKIYLPPIPADEIRNPVVLRALSQARKVINGVVRRYGSPARIHIETAREVGKSFKDRKEIEKRQEENRKDREKAAAKFREYFPNFVGEPKSKDILKLRLYEQQHGKCLYSGKEINLVRLNEKGYVEIDHALPFSRTWDDSFNNKVLVLGSENQNKGNQTPYEYFNGKDNSREWQEFKARVETSRFPRSKKQRILLQKFDEDGFKECNLNDTRYVNRFLCQFVADHILLTGKGKRRVFASNGQITNLLRGFWGLRKVRAENDRHHALDAVVVACSTVAMQQKITRFVRYKEMNAFDGKTIDKETGKVLHQKTHFPQPWEFFAQEVMIRVFGKPDGKPEFEEADTPEKLRTLLAEKLSSRPEAVHEYVTPLFVSRAPNRKMSGAHKDTLRSAKRFVKHNEKISVKRVWLTEIKLADLENMVNYKNGREIELYEALKARLEAYGGNAKQAFDPKDNPFYKKGGQLVKAVRVEKTQESGVLLNKKNAYTIADNGDMVRVDVFCKVDKKGKNQYFIVPIYAWQVAENILPDIDCKGYRIDDSYTFCFSLHKYDLIAFQKDEKSKVEFAYYINCDSSNGRFYLAWHDKGSKEQQFRISTQNLVLIQKYQVNELGKEIRPCRLKKRPPVR

SEQ ID NO: 12 - protein, 1139 aa, synthetic construct
  REGION 1..1139: note = Synthetic
MDGSGGGSPKKKRKVEDKRPAATKKAGQAKKKKGGSGGGAAFKPNPINYILGLDIGIASVGWAMVEIDEEENPIRLIDLGVRVFERAEVPKTGDSLAMARRLARSVRRLTRRRAHRLLRARRLLKREGVLQAADFDENGLIKSLPNTPWQLRAAALDRKLTPLEWSAVLLHLIKHRGYLSQRKNEGETADKELGALLKGVANNAHALQTGDFRTPAELALNKFEKESGHIRNQRGDYSHTFSRKDLQAELILLFEKQKEFGNPHVSGGLKEGIETLLMTQRPALSGDAVQKMLGHCTFEPAEPKAAKNTYTAERFIWLTKLNNLRILEQGSERPLTDTERATLMDEPYRKSKLTYAQARKLLGLEDTAFFKGLRYGKDNAEASTLMEMKAYHAISRALEKEGLKDKKSPLNLSSELQDEIGTAFSLFKTDEDITGRLKDRVQPEILEALLKHISFDKFVQISLKALRRIVPLMEQGKRYDEACAEIYGDHYGKKNTEEKIYLPPIPADEIRNPVVLRALSQARKVINGVVRRYGSPARIHIETAREVGKSFKDRKEIEKRQEENRKDREKAAAKFREYFPNFVGEPKSKDILKLRLYEQQHGKCLYSGKEINLVRLNEKGYVEIDHALPFSRTWDDSFNNKVLVLGSENQNKGNQTPYEYFNGKDNSREWQEFKARVETSRFPRSKKQRILLQKFDEDGFKECNLNDTRYVNRFLCQFVADHILLTGKGKRRVFASNGQITNLLRGFWGLRKVRAENDRHHALDAVVVACSTVAMQQKITRFVRYKEMNAFDGKTIDKETGKVLHQKTHFPQPWEFFAQEVMIRVFGKPDGKPEFEEADTPEKLRTLLAEKLSSRPEAVHEYVTPLFVSRAPNRKMSGAHKDTLRSAKRFVKHNEKISVKRVWLTEIKLADLENMVNYKNGREIELYEALKARLEAYGGNAKQAFDPKDNPFYKKGGQLVKAVRVEKTQESGVLLNKKNAYTIADNGDMVRVDVFCKVDKKGKNQYFIVPIYAWQVAENILPDIDCKGYRIDDSYTFCFSLHKYDLIAFQKDEKSKVEFAYYINCDSSNGRFYLAWHDKGSKEQQFRISTQNLVLIQKYQVNELGKEIRPCRLKKRPPVRSESATPESVSGWRLFKKIS

SEQ ID NO: 13 - protein, 1113 aa, synthetic construct
  REGION 1..1113: note = Synthetic
MDGSGGGSEDKRPAATKKAGQAKKKKGGSGGGAAFKPNPINYILGLDIGIASVGWAMVEIDEEENPIRLIDLGVRVFERAEVPKTGDSLAMARRLARSVRRLTRRRAHRLLRARRLLKREGVLQAADFDENGLIKSLPNTPWQLRAAALDRKLTPLEWSAVLLHLIKHRGYLSQRKNEGETADKELGALLKGVANNAHALQTGDFRTPAELALNKFEKESGHIRNQRGDYSHTFSRKDLQAELILLFEKQKEFGNPHVSGGLKEGIETLLMTQRPALSGDAVQKMLGHCTFEPAEPKAAKNTYTAERFIWLTKLNNLRILEQGSERPLTDTERATLMDEPYRKSKLTYAQARKLLGLEDTAFFKGLRYGKDNAEASTLMEMKAYHAISRALEKEGLKDKKSPLNLSSELQDEIGTAFSLFKTDEDITGRLKDRVQPEILEALLKHISFDKFVQISLKALRRIVPLMEQGKRYDEACAEIYGDHYGKKNTEEKIYLPPIPADEIRNPVVLRALSQARKVINGVVRRYGSPARIHIETAREVGKSFKDRKEIEKRQEENRKDREKAAAKFREYFPNFVGEPKSKDILKLRLYEQQHGKCLYSGKEINLVRLNEKGYVEIDHALPFSRTWDDSFNNKVLVLGSENQNKGNQTPYEYFNGKDNSREWQEFKARVETSRFPRSKKQRILLQKFDEDGFKECNLNDTRYVNRFLCQFVADHILLTGKGKRRVFASNGQITNLLRGFWGLRKVRAENDRHHALDAVVVACSTVAMQQKITRFVRYKEMNAFDGKTIDKETGKVLHQKTHFPQPWEFFAQEVMIRVFGKPDGKPEFEEADTPEKLRTLLAEKLSSRPEAVHEYVTPLFVSRAPNRKMSGAHKDTLRSAKRFVKHNEKISVKRVWLTEIKLADLENMVNYKNGREIELYEALKARLEAYGGNAKQAFDPKDNPFYKKGGQLVKAVRVEKTQESGVLLNKKNAYTIADNGDMVRVDVFCKVDKKGKNQYFIVPIYAWQVAENILPDIDCKGYRIDDSYTFCFSLHKYDLIAFQKDEKSKVEFAYYINCDSSNGRFYLAWHDKGSKEQQFRISTQNLVLIQKYQVNELGKEIRPCRLKKRPPVR

SEQ ID NO: 14 - protein, 1334 aa, synthetic construct
  REGION 1..1334: note = Synthetic
MDGSGGGSPKKKRKVEDKRPAATKKAGQAKKKKGGSGGGEASPASGPRHLMDPHIFTSNFNNGIGRHKTYLCYEVERLDNGTSVKMDQHRGFLHNQAKNLLCGFYGRHAELRFLDLVPSLQLDPAQIYRVTWFISWSPCFSWGCAGEVRAFLQENTHVRLRIFAARIYDYDPLYKEALQMLRDAGAQVSIMTYDEFKHCWDTFVDHQGCPFQPWDGLDEHSQALSGRLRAILQNQGNSGSETPGTSESATPESAAFKPNPINYILGLAIGIASVGWAMVEIDEEENPIRLIDLGVRVFERAEVPKTGDSLAMARRLARSVRRLTRRRAHRLLRARRLLKREGVLQAADFDENGLIKSLPNTPWQLRAAALDRKLTPLEWSAVLLHLIKHRGYLSQRKNEGETADKELGALLKGVANNAHALQTGDFRTPAELALNKFEKESGHIRNQRGDYSHTFSRKDLQAELILLFEKQKEFGNPHVSGGLKEGIETLLMTQRPALSGDAVQKMLGHCTFEPAEPKAAKNTYTAERFIWLTKLNNLRILEQGSERPLTDTERATLMDEPYRKSKLTYAQARKLLGLEDTAFFKGLRYGKDNAEASTLMEMKAYHAISRALEKEGLKDKKSPLNLSSELQDEIGTAFSLFKTDEDITGRLKDRVQPEILEALLKHISFDKFVQISLKALRRIVPLMEQGKRYDEACAEIYGDHYGKKNTEEKIYLPPIPADEIRNPVVLRALSQARKVINGVVRRYGSPARIHIETAREVGKSFKDRKEIEKRQEENRKDREKAAAKFREYFPNFVGEPKSKDILKLRLYEQQHGKCLYSGKEINLVRLNEKGYVEIDHALPFSRTWDDSFNNKVLVLGSENQNKGNQTPYEYFNGKDNSREWQEFKARVETSRFPRSKKQRILLQKFDEDGFKECNLNDTRYVNRFLCQFVADHILLTGKGKRRVFASNGQITNLLRGFWGLRKVRAENDRHHALDAVVVACSTVAMQQKITRFVRYKEMNAFDGKTIDKETGKVLHQKTHFPQPWEFFAQEVMIRVFGKPDGKPEFEEADTPEKLRTLLAEKLSSRPEAVHEYVTPLFVSRAPNRKMSGAHKDTLRSAKRFVKHNEKISVKRVWLTEIKLADLENMVNYKNGREIELYEALKARLEAYGGNAKQAFDPKDNPFYKKGGQLVKAVRVEKTQESGVLLNKKNAYTIADNGDMVRVDVFCKVDKKGKNQYFIVPIYAWQVAENILPDIDCKGYRIDDSYTFCFSLHKYDLIAFQKDEKSKVEFAYYINCDSSNGRFYLAWHDKGSKEQQFRISTQNLVLIQKYQVNELGKEIRPCRLKKRPPVR

SEQ ID NO: 15 - RNA, 3837 nt, synthetic construct
  misc_feature 1..3837: note = Synthetic
  source 1..3837: mol_type = other RNA
gggaagctcagaataaacgctcaactttggccggatctgccaccatgaccggtgccgccttcaagcccaaccccatcaactacatcctgggcctggacatcggcatcgcctccgtgggctgggccatggtggagatcgacgaggaggagaaccccatccggctgatcgacctgggcgtgcgggtgttcgagcgggccgaggtgcccaagaccggcgactccctggccatggcccggcggctggcccggtccgtgcggcggctgacccggcggcgggcccaccggctgctgcgggcccggcggctgctgaagcgggagggcgtgctgcaggccgccgacttcgacgagaacggcctgatcaagtccctgcccaacaccccctggcagctgcgggccgccgccctggaccggaagctgacccccctggagtggtccgccgtgctgctgcacctgatcaagcaccggggctacctgtcccagcggaagaacgagggcgagaccgccgacaaggagctgggcgccctgctgaagggcgtggccaacaacgcccacgccctgcagaccggcgacttccggacccccgccgagctggccctgaacaagttcgagaaggagtccggccacatccggaaccagcggggcgactactcccacaccttctcccggaaggacctgcaggccgagctgatcctgctgttcgagaagcagaaggagttcggcaacccccacgtgtccggcggcctgaaggagggcatcgagaccctgctgatgacccagcggcccgccctgtccggcgacgccgtgcagaagatgctgggccactgcaccttcgagcccgccgagcccaaggccgccaagaacacctacaccgccgagcggttcatctggctgaccaagctgaacaacctgcggatcctggagcagggctccgagcggcccctgaccgacaccgagcgggccaccctgatggacgagccctaccggaagtccaagctgacctacgcccaggcccggaagctgctgggcctggaggacaccgccttcttcaagggcctgcggtacggcaaggacaacgccgaggcctccaccctgatggagatgaaggcctaccacgccatctcccgggccctggagaaggagggcctgaaggacaagaagtcccccctgaacctgtcctccgagctgcaggacgagatcggcaccgccttctccctgttcaagaccgacgaggacatcaccggccggctgaaggaccgggtgcagcccgagatcctggaggccctgctgaagcacatctccttcgacaagttcgtgcagatctccctgaaggccctgcggcggatcgtgcccctgatggagcagggcaagcggtacgacgaggcctgcgccgagatctacggcgaccactacggcaagaagaacaccgaggagaagatctacctgccccccatccccgccgacgagatccggaaccccgtggtgctgcgggccctgtcccaggcccggaaggtgatcaacggcgtggtgcggcggtacggctcccccgcccggatccacatcgagaccgcccgggaggtgggcaagtccttcaaggaccggaaggagatcgagaagcggcaggaggagaaccggaaggaccgggagaaggccgccgccaagttccgggagtacttccccaacttcgtgggcgagcccaagtccaaggacatcctgaagctgcggctgtacgagcagcagcacggcaagtgcctgtactccggcaaggagatcaacctggtgcggctgaacgagaagggctacgtggagatcgaccacgccctgcccttctcccggacctgggacgactccttcaacaacaaggtgctggtgctgggctccgagaaccagaacaagggcaaccagaccccctacgagtacttcaacggcaaggacaactcccgggagtggcaggagttcaaggcccgggtggagacctcccggttcccccggtccaagaagcagcggatcctgctgcagaagttcgacgaggacggcttcaaggagtgcaacctgaacgacacccggtacgtgaaccgcttcctgtgccagttcgtggccgaccacatcctgctgaccggcaagggcaagcggcgggtgttcgcctccaacggccagatcaccaacctgctgcggggcttctggggcctgcggaaggtgcgggccgagaacgaccggcaccacgccctggacgccgtggtggtggcctgctccaccgtggccatgcagcagaagatcacccggttcgtgcggtacaaggagatgaacgccttcgacggcaagaccatcgacaaggagaccggcaaggtgctgcaccagaagacccacttcccccagccctgggagttcttcgcccaggaggtgatgatccgggtgttcggcaagcccgacggcaagcccgagttcgaggaggccgacacccccgagaagctgcggaccctgctggccgagaagctgtcctcccggcccgaggccgtgcacgagtacgtgacccccctgttcgtgtcccgggcccccaaccggaagatgtccggcgcccacaaggacaccctgcggtccgccaagcggttcgtgaagcacaacgagaagatctccgtgaagcgggtgtggctgaccgagatcaagctggccgacctggagaacatggtgaactacaagaacggccgggagatcgagctgtacgaggccctgaaggcccggctggaggcctacggcggcaacgccaagcaggccttcgaccccaaggacaaccccttctacaagaagggcggccagctggtgaaggccgtgcgggtggagaagacccaggagtccggcgtgctgctgaacaagaagaacgcctacaccatcgccgacaacggcgacatggtgcgggtggacgtgttctgcaaggtggacaagaagggcaagaaccagtacttcatcgtgcccatctacgcctggcaggtggccgagaacatcctgcccgacatcgactgcaagggctaccggatcgacgactcctacaccttctgcttctccctgcacaagtacgacctgatcgccttccagaaggacgagaagtccaaggtggagttcgcctactacatcaactgcgactcctccaacggccggttctacctggcctggcacgacaagggctccaaggagcagcagttccggatctccacccagaacctggtgctgatccagaagtaccaggtgaacgagctgggcaaggagatccggccctgccggctgaagaagcggccccccgtgcggtccggaaagcggaccgccgacggctccgagttcgagtcccccaagaagaagcggaaggtggagtagctagcaccagcctcaagaacacccgaatggagtctctaagctacataataccaacttacactttacaaaatgttgtcccccaaaatgtagccattcgtatctgctcctaataaaaagaaagtttcttcacattctctcgagaaaaaaaaaaaatggaaaaaaaaaaaacggaaaaaaaaaaaaggtaaaaaaaaaaaatataaaaaaaaaaaacataaaaaaaaaaaacgaaaaaaaaaaaacgtaaaaaaaaaaaactcaaaaaaaaaaaagataaaaaaaaaaaacctaaaaaaaaaaaatgtaaaaaaaaaaaagggaaaaaaaaaaaacgcaaaaaaaaaaaacacaaaaaaaaaaaatgcaaaaaaaaaaaatcgaaaaaaaaaaaatctaaaaaaaaaaaacgaaaaaaaaaaaacccaaaaaaaaaaaagacaaaaaaaaaaaatagaaaaaaaaaaaagttaaaaaa

SEQ ID NO: 16 - RNA, 5342 nt, synthetic construct
  misc_feature 1..5342: note = Synthetic
  source 1..5342: mol_type = other RNA
gggaagctcagaataaacgctcaactttggccggatctgccaccatggaggcctcccccgcctccggcccccggcacctgatggacccccacatcttcacctccaacttcaacaacggcatcggccggcacaagacctacctgtgctacgaggtggagcggctggacaacggcacctccgtgaagatggaccagcaccggggcttcctgcacaaccaggccaagaacctgctgtgcggcttctacggccggcacgccgagctgcggttcctggacctggtgccctccctgcagctggaccccgcccagatctaccgggtgacctggttcatctcctggtccccctgcttctcctggggctgcgccggcgaggtgcgggccttcctgcaggagaacacccacgtgcggctgcggatcttcgccgcccggatctacgactacgaccccctgtacaaggaggccctgcagatgctgcgggacgccggcgcccaggtgtccatcatgacctacgacgagttcaagcactgctgggacaccttcgtggaccaccagggctgccccttccagccctgggacggcctggacgagcactcccaggccctgtccggccggctgcgggccatcctgcagaaccagggcaactccggctccgagacccccggcacctccgagtccgccacccccgagtccgacaagaagtactccatcggcctggccatcggcaccaactccgtgggctgggccgtgatcaccgacgagtacaaggtgccctccaagaagttcaaggtgctgggcaacaccgaccggcactccatcaagaagaacctgatcggcgccctgctgttcgactccggcgagaccgccgaggccacccggctgaagcggaccgcccggcggcggtacacccggcggaagaaccggatctgctacctgcaggagatcttctccaacgagatggccaaggtggacgactccttcttccaccggctggaggagtccttcctggtggaggaggacaagaagcacgagcggcaccccatcttcggcaacatcgtggacgaggtggcctaccacgagaagtaccccaccatctaccacctgcggaagaagctggtggactccaccgacaaggccgacctgcggctgatctacctggccctggcccacatgatcaagttccggggccacttcctgatcgagggcgacctgaaccccgacaactccgacgtggacaagctgttcatccagctggtgcagacctacaaccagctgttcgaggagaaccccatcaacgcctccggcgtggacgccaaggccatcctgtccgcccggctgtccaagtcccggcggctggagaacctgatcgcccagctgcccggcgagaagaagaacggcctgttcggcaacctgatcgccctgtccctgggcctgacccccaacttcaagtccaacttcgacctggccgaggacgccaagctgcagctgtccaaggacacctacgacgacgacctggacaacctgctggcccagatcggcgaccagtacgccgacctgttcctggccgccaagaacctgtccgacgccatcctgctgtccgacatcctgcgggtgaacaccgagatcaccaaggcccccctgtccgcctccatgatcaagcggtacgacgagcaccaccaggacctgaccctgctgaaggccctggtgcggcagcagctgcccgagaagtacaaggagatcttcttcgaccagtccaagaacggctacgccggctacatcgacggcggcgcctcccaggaggagttctacaagttcatcaagcccatcctggagaagatggacggcaccgaggagctgctggtgaagctgaaccgggaggacctgctgcggaagcagcggaccttcgacaacggctccatcccccaccagatccacctgggcgagctgcacgccatcctgcggcggcaggaggacttctaccccttcctgaaggacaaccgggagaagatcgagaagatcctgaccttccggatcccctactacgtgggccccctggcccggggcaactcccggttcgcctggatgacccggaagtccgaggagaccatcaccccctggaacttcgaggaggtggtggacaagggcgcctccgcccagtccttcatcgagcggatgaccaacttcgacaagaacctgcccaacgagaaggtgctgcccaagcactccctgctgtacgagtacttcaccgtgtacaacgagctgaccaaggtgaagtacgtgaccgagggcatgcggaagcccgccttcctgtccggcgagcagaagaaggccatcgtggacctgctgttcaagaccaaccggaaggtgaccgtgaagcagctgaaggaggactacttcaagaagatcgagtgcttcgactccgtggagatctccggcgtggaggaccggttcaacgcctccctgggcacctaccacgacctgctgaagatcatcaaggacaaggacttcctggacaacgaggagaacgaggacatcctggaggacatcgtgctgaccctgaccctgttcgaggaccgggagatgatcgaggagcggctgaagacctacgcccacctgttcgacgacaaggtgatgaagcagctgaagcggcggcggtacaccggctggggccggctgtcccggaagctgatcaacggcatccgggacaagcagtccggcaagaccatcctggacttcctgaagtccgacggcttcgccaaccggaacttcatgcagctgatccacgacgactccctgaccttcaaggaggacatccagaaggcccaggtgtccggccagggcgactccctgcacgagcacatcgccaacctggccggctcccccgccatcaagaagggcatcctgcagaccgtgaaggtggtggacgagctggtgaaggtgatgggccggcacaagcccgagaacatcgtgatcgagatggcccgggagaaccagaccacccagaagggccagaagaactcccgggagcggatgaagcggatcgaggagggcatcaaggagctgggctcccagatcctgaaggagcaccccgtggagaacacccagctgcagaacgagaagctgtacctgtactacctgcagaacggccgggacatgtacgtggaccaggagctggacatcaaccggctgtccgactacgacgtggaccacatcgtgccccagtccttcctgaaggacgactccatcgacaacaaggtgctgacccggtccgacaagaaccggggcaagtccgacaacgtgccctccgaggaggtggtgaagaagatgaagaactactggcggcagctgctgaacgccaagctgatcacccagcggaagttcgacaacctgaccaaggccgagcggggcggcctgtccgagctggacaaggccggcttcatcaagcggcagctggtggagacccggcagatcaccaagcacgtggcccagatcctggactcccggatgaacaccaagtacgacgagaacgacaagctgatccgggaggtgaaggtgatcaccctgaagtccaagctggtgtccgacttccggaaggacttccagttctacaaggtgcgggagatcaacaactaccaccacgcccacgacgcctacctgaacgccgtggtgggcaccgccctgatcaagaagtaccccaagctggagtccgagttcgtgtacggcgactacaaggtgtacgacgtgcggaagatgatcgccaagtccgagcaggagatcggcaaggccaccgccaagtacttcttctactccaacatcatgaacttcttcaagaccgagatcaccctggccaacggcgagatccggaagcggcccctgatcgagaccaacggcgagaccggcgagatcgtgtgggacaagggccgggacttcgccaccgtgcggaaggtgctgtccatgccccaggtgaacatcgtgaagaagaccgaggtgcagaccggcggcttctccaaggagtccatcctgcccaagcggaactccgacaagctgatcgcccggaagaaggactgggaccccaagaagtacggcggcttcgactcccccaccgtggcctactccgtgctggtggtggccaaggtggagaagggcaagtccaagaagctgaagtccgtgaaggagctgctgggcatcaccatcatggagcggtcctccttcgagaagaaccccatcgacttcctggaggccaagggctacaaggaggtgaagaaggacctgatcatcaagctgcccaagtactccctgttcgagctggagaacggccggaagcggatgctggcctccgccggcgagctgcagaagggcaacgagctggccctgccctccaagtacgtgaacttcctgtacctggcctcccactacgagaagctgaagggctcccccgaggacaacgagcagaagcagctgttcgtggagcagcacaagcactacctggacgagatcatcgagcagatctccgagttctccaagcgggtgatcctggccgacgccaacctggacaaggtgctgtccgcctacaacaagcaccgggacaagcccatccgggagcaggccgagaacatcatccacctgttcaccctgaccaacctgggcgcccccgccgccttcaagtacttcgacaccaccatcgaccggaagcggtacacctccaccaaggaggtgctggacgccaccctgatccaccagtccatcaccggcctgtacgagacccggatcgacctgtcccagctgggcggcgacggcggcggctcccccaagaagaagcggaaggtgtgactagcaccagcctcaagaacacccgaatggagtctctaagctacataataccaacttacactttacaaaatgttgtcccccaaaatgtagccattcgtatctgctcctaataaaaagaaagtttcttcacattctctcgagaaaaaaaaaaaatggaaaaaaaaaaaacggaaaaaaaaaaaaggtaaaaaaaaaaaatataaaaaaaaaaaacataaaaaaaaaaaacgaaaaaaaaaaaacgtaaaaaaaaaaaactcaaaaaaaaaaaagataaaaaaaaaaaacctaaaaaaaaaaaatgtaaaaaaaaaaaagggaaaaaaaaaaaacgcaaaaaaaaaaaacacaaaaaaaaaaaatgcaaaaaaaaaaaatcgaaaaaaaaaaaatctaaaaaaaaaaaacgaaaaaaaaaaaacccaaaaaaaaaaaagacaaaaaaaaaaaatagaaaaaaaaaaaagttaaaaaaaaaaaactgaaaaaaaaaaaatttaaaaaaaaaaaatctag

SEQ ID NO: 17 - RNA, 887 nt, synthetic construct
  misc_feature 1..887: note = Synthetic
  source 1..887: mol_type = other RNA
gggaagctcagaataaacgctcaactttggccggatctgccaccatgaccaacctgtccgacatcatcgagaaggagaccggcaagcagctggtgatccaggagtccatcctgatgctgcccgaggaggtggaggaggtgatcggcaacaagcccgagtccgacatcctggtgcacaccgcctacgacgagtccaccgacgagaacgtgatgctgctgacctccgacgcccccgagtacaagccctgggccctggtgatccaggactccaacggcgagaacaagatcaagatgctgtccggcggctccaagcggaccgccgacggctccgagttcgagtcccccaagaagaagcggaaggtggagtgatagctagcaccagcctcaagaacacccgaatggagtctctaagctacataataccaacttacactttacaaaatgttgtcccccaaaatgtagccattcgtatctgctcctaataaaaagaaagtttcttcacattctctcgagaaaaaaaaaaaatggaaaaaaaaaaaacggaaaaaaaaaaaaggtaaaaaaaaaaaatataaaaaaaaaaaacataaaaaaaaaaaacgaaaaaaaaaaaacgtaaaaaaaaaaaactcaaaaaaaaaaaagataaaaaaaaaaaacctaaaaaaaaaaaatgtaaaaaaaaaaaagggaaaaaaaaaaaacgcaaaaaaaaaaaacacaaaaaaaaaaaatgcaaaaaaaaaaaatcgaaaaaaaaaaaatctaaaaaaaaaaaacgaaaaaaaaaaaacccaaaaaaaaaaaagacaaaaaaaaaaaatagaaaaaaaaaaaagttaaaaaaaaaaaactgaaaaaaaaaaaatttaaaaaaaaaaaatctag

SEQ ID NO: 18 - DNA, 3850 bp, synthetic construct
  misc_feature 1..3850: note = Synthetic
  source 1..3850: mol_type = other DNA
gggaagctcagaataaacgctcaactttggccggatctgccaccatggccgccttcaagcccaaccccatcaactacatcctgggcctggacatcggcatcgcctccgtgggctgggccatggtggagatcgacgaggaggagaaccccatccggctgatcgacctgggcgtgcgggtgttcgagcgggccgaggtgcccaagaccggcgactccctggccatggcccggcggctggcccggtccgtgcggcggctgacccggcggcgggcccaccggctgctgcgggcccggcggctgctgaagcgggagggcgtgctgcaggccgccgacttcgacgagaacggcctgatcaagtccctgcccaacaccccctggcagctgcgggccgccgccctggaccggaagctgacccccctggagtggtccgccgtgctgctgcacctgatcaagcaccggggctacctgtcccagcggaagaacgagggcgagaccgccgacaaggagctgggcgccctgctgaagggcgtggccaacaacgcccacgccctgcagaccggcgacttccggacccccgccgagctggccctgaacaagttcgagaaggagtccggccacatccggaaccagcggggcgactactcccacaccttctcccggaaggacctgcaggccgagctgatcctgctgttcgagaagcagaaggagttcggcaacccccacgtgtccggcggcctgaaggagggcatcgagaccctgctgatgacccagcggcccgccctgtccggcgacgccgtgcagaagatgctgggccactgcaccttcgagcccgccgagcccaaggccgccaagaacacctacaccgccgagcggttcatctggctgaccaagctgaacaacctgcggatcctggagcagggctccgagcggcccctgaccgacaccgagcgggccaccctgatggacgagccctaccggaagtccaagctgacctacgcccaggcccggaagctgctgggcctggaggacaccgccttcttcaagggcctgcggtacggcaaggacaacgccgaggcctccaccctgatggagatgaaggcctaccacgccatctcccgggccctggagaaggagggcctgaaggacaagaagtcccccctgaacctgtcctccgagctgcaggacgagatcggcaccgccttctccctgttcaagaccgacgaggacatcaccggccggctgaaggaccgggtgcagcccgagatcctggaggccctgctgaagcacatctccttcgacaagttcgtgcagatctccctgaaggccctgcggcggatcgtgcccctgatggagcagggcaagcggtacgacgaggcctgcgccgagatctacggcgaccactacggcaagaagaacaccgaggagaagatctacctgccccccatccccgccgacgagatccggaaccccgtggtgctgcgggccctgtcccaggcccggaaggtgatcaacggcgtggtgcggcggtacggctcccccgcccggatccacatcgagaccgcccgggaggtgggcaagtccttcaaggaccggaaggagatcgagaagcggcaggaggagaaccggaaggaccgggagaaggccgccgccaagttccgggagtacttccccaacttcgtgggcgagcccaagtccaaggacatcctgaagctgcggctgtacgagcagcagcacggcaagtgcctgtactccggcaaggagatcaacctggtgcggctgaacgagaagggctacgtggagatcgaccacgccctgcccttctcccggacctgggacgactccttcaacaacaaggtgctggtgctgggctccgagaaccagaacaagggcaaccagaccccctacgagtacttcaacggcaaggacaactcccgggagtggcaggagttcaaggcccgggtggagacctcccggttcccccggtccaagaagcagcggatcctgctgcagaagttcgacgaggacggcttcaaggagtgcaacctgaacgacacccggtacgtgaaccggttcctgtgccagttcgtggccgaccacatcctgctgaccggcaagggcaagcggcgggtgttcgcctccaacggccagatcaccaacctgctgcggggcttctggggcctgcggaaggtgcgggccgagaacgaccggcaccacgccctggacgccgtggtggtggcctgctccaccgtggccatgcagcagaagatcacccggttcgtgcggtacaaggagatgaacgccttcgacggcaagaccatcgacaaggagaccggcaaggtgctgcaccagaagacccacttcccccagccctgggagttcttcgcccaggaggtgatgatccgggtgttcggcaagcccgacggcaagcccgagttcgaggaggccgacacccccgagaagctgcggaccctgctggccgagaagctgtcctcccggcccgaggccgtgcacgagtacgtgacccccctgttcgtgtcccgggcccccaaccggaagatgtccggcgcccacaaggacaccctgcggtccgccaagcggttcgtgaagcacaacgagaagatctccgtgaagcgggtgtggctgaccgagatcaagctggccgacctggagaacatggtgaactacaagaacggccgggagatcgagctgtacgaggccctgaaggcccggctggaggcctacggcggcaacgccaagcaggccttcgaccccaaggacaaccccttctacaagaagggcggccagctggtgaaggccgtgcgggtggagaagacccaggagtccggcgtgctgctgaacaagaagaacgcctacaccatcgccgacaacggcgacatggtgcgggtggacgtgttctgcaaggtggacaagtccggcggcggctcccccaagaagaagcggaaggtgtccggcggctccggcaagaaccagtacttcatcgtgcccatctacgcctggcaggtggccgagaacatcctgcccgacatcgactgcaagggctaccggatcgacgactcctacaccttctgcttctccctgcacaagtacgacctgatcgccttccagaaggacgagaagtccaaggtggagttcgcctactacatcaactgcgactcctccaacggccggttctacctggcctggcacgacaagggctccaaggagcagcagttccggatctccacccagaacctggtgctgatccagaagtaccaggtgaacgagctgggcaaggagatccggccctgccggctgaagaagcggccccccgtgcggtagctagcaccagcctcaagaacacccgaatggagtctctaagctacataataccaacttacactttacaaaatgttgtcccccaaaatgtagccattcgtatctgctcctaataaaaagaaagtttcttcacattctctcgagaaaaaaaaaaaatggaaaaaaaaaaaacggaaaaaaaaaaaaggtaaaaaaaaaaaatataaaaaaaaaaaacataaaaaaaaaaaacgaaaaaaaaaaaacgtaaaaaaaaaaaactcaaaaaaaaaaaagataaaaaaaaaaaacctaaaaaaaaaaaatgtaaaaaaaaaaaagggaaaaaaaaaaaacgcaaaaaaaaaaaacacaaaaaaaaaaaatgcaaaaaaaaaaaatcgaaaaaaaaaaaatctaaaaaaaaaaaacgaaaaaaaaaaaacccaaaaaaaaaaaagacaaaaaaaaaaaatagaaaaaaaaaaaagttaaaaaaaaaaaactgaaaaaaaaaaaatttaaaaaaaaaaaat

SEQ ID NO: 19 - DNA, 3889 bp, synthetic construct
  misc_feature 1..3889: note = Synthetic
  source 1..3889: mol_type = other DNA
gggaagctcagaataaacgctcaactttggccggatctgccaccatggtgcccaagaagaagcggaaggtggccgccttcaagcccaaccccatcaactacatcctgggcctggacatcggcatcgcctccgtgggctgggccatggtggagatcgacgaggaggagaaccccatccggctgatcgacctgggcgtgcgggtgttcgagcgggccgaggtgcccaagaccggcgactccctggccatggcccggcggctggcccggtccgtgcggcggctgacccggcggcgggcccaccggctgctgcgggcccggcggctgctgaagcgggagggcgtgctgcaggccgccgacttcgacgagaacggcctgatcaagtccctgcccaacaccccctggcagctgcgggccgccgccctggaccggaagctgacccccctggagtggtccgccgtgctgctgcacctgatcaagcaccggggctacctgtcccagcggaagaacgagggcgagaccgccgacaaggagctgggcgccctgctgaagggcgtggccaacaacgcccacgccctgcagaccggcgacttccggacccccgccgagctggccctgaacaagttcgagaaggagtccggccacatccggaaccagcggggcgactactcccacaccttctcccggaaggacctgcaggccgagctgatcctgctgttcgagaagcagaaggagttcggcaacccccacgtgtccggcggcctgaaggagggcatcgagaccctgctgatgacccagcggcccgccctgtccggcgacgccgtgcagaagatgctgggccactgcaccttcgagcccgccgagcccaaggccgccaagaacacctacaccgccgagcggttcatctggctgaccaagctgaacaacctgcggatcctggagcagggctccgagcggcccctgaccgacaccgagcgggccaccctgatggacgagccctaccggaagtccaagctgacctacgcccaggcccggaagctgctgggcctggaggacaccgccttcttcaagggcctgcggtacggcaaggacaacgccgaggcctccaccctgatggagatgaaggcctaccacgccatctcccgggccctggagaaggagggcctgaaggacaagaagtcccccctgaacctgtcctccgagctgcaggacgagatcggcaccgccttctccctgttcaagaccgacgaggacatcaccggccggctgaaggaccgggtgcagcccgagatcctggaggccctgctgaagcacatctccttcgacaagttcgtgcagatctccctgaaggccctgcggcggatcgtgcccctgatggagcagggcaagcggtacgacgaggcctgcgccgagatctacggcgaccactacggcaagaagaacaccgaggagaagatctacctgccccccatccccgccgacgagatccggaaccccgtggtgctgcgggccctgtcccaggcccggaaggtgatcaacggcgtggtgcggcggtacggctcccccgcccggatccacatcgagaccgcccgggaggtgggcaagtccttcaaggaccggaaggagatcgagaagcggcaggaggagaaccggaaggaccgggagaaggccgccgccaagttccgggagtacttccccaacttcgtgggcgagcccaagtccaaggacatcctgaagctgcggctgtacgagcagcagcacggcaagtgcctgtactccggcaaggagatcaacctggtgcggctgaacgagaagggctacgtggagatcgaccacgccctgcccttctcccggacctgggacgactccttcaacaacaaggtgctggtgctgggctccgagaaccagaacaagggcaaccagaccccctacgagtacttcaacggcaaggacaactcccgggagtggcaggagttcaaggcccgggtggagacctcccggttcccccggtccaagaagcagcggatcctgctgcagaagttcgacgaggacggcttcaaggagtgcaacctgaacgacacccggtacgtgaaccggttcctgtgccagttcgtggccgaccacatcctgctgaccggcaagggcaagcggcgggtgttcgcctccaacggccagatcaccaacctgctgcggggcttctggggcctgcggaaggtgcgggccgagaacgaccggcaccacgccctggacgccgtggtggtggcctgctccaccgtggccatgcagcagaagatcacccggttcgtgcggtacaaggagatgaacgccttcgacggcaagaccatcgacaaggagaccggcaaggtgctgcaccagaagacccacttcccccagccctgggagttcttcgcccaggaggtgatgatccgggtgttcggcaagcccgacggcaagcccgagttcgaggaggccgacacccccgagaagctgcggaccctgctggccgagaagctgtcctcccggcccgaggccgtgcacgagtacgtgacccccctgttcgtgtcccgggcccccaaccggaagatgtccggcgcccacaaggacaccctgcggtccgccaagcggttcgtgaagcacaacgagaagatctccgtgaagcgggtgtggctgaccgagatcaagctggccgacctggagaacatggtgaactacaagaacggccgggagatcgagctgtacgaggccctgaaggcccggctggaggcctacggcggcaacgccaagcaggccttcgaccccaaggacaaccccttctacaagaagggcggccagctggtgaaggccgtgcgggtggagaagacccaggagtccggcgtgctgctgaacaagaagaacgcctacaccatcgccgacaacggcgacatggtgcgggtggacgtgttctgcaaggtggacaagaagggcaagaaccagtacttcatcgtgcccatctacgcctggcaggtggccgagaacatcctgcccgacatcgactgcaagggctaccggatcgacgactcctacaccttctgcttctccctgcacaagtacgacctgatcgccttccagaaggacgagaagtccaaggtggagttcgcctactacatcaactgcgactcctccaacggccggttctacctggcctggcacgacaagggctccaaggagcagcagttccggatctccacccagaacctggtgctgatccagaagtaccaggtgaacgagctgggcaaggagatccggccctgccggctgaagaagcggccccccgtgcggtacccctacgacgtgcccgactacgccgccgcccccgccgccaagaagaagaagctggactagctagcaccagcctcaagaacacccgaatggagtctctaagctacataataccaacttacactttacaaaatgttgtcccccaaaatgtagccattcgtatctgctcctaataaaaagaaagtttcttcacattctctcgagaaaaaaaaaaaatggaaaaaaaaaaaacggaaaaaaaaaaaaggtaaaaaaaaaaaatataaaaaaaaaaaacataaaaaaaaaaaacgaaaaaaaaaaaacgtaaaaaaaaaaaactcaaaaaaaaaaaagataaaaaaaaaaaacctaaaaaaaaaaaatgtaaaaaaaaaaaagggaaaaaaaaaaaacgcaaaaaaaaaaaacacaaaaaaaaaaaatgcaaaaaaaaaaaatcgaaaaaaaaaaaatctaaaaaaaaaaaacgaaaaaaaaaaaacccaaaaaaaaaaaagacaaaaaaaaaaaatagaaaaaaaaaaaagttaaaaaaaaaaaactgaaaaaaaaaaaatttaaaaaaaaaaaat

SEQ ID NO: 20 - RNA, 4067 nt, synthetic construct
  misc_feature 1..4067: note = Synthetic
  source 1..4067: mol_type = other RNA
gggaagctcagaataaacgctcaactttggccggatctgccaccatggtgcccaagaagaagcggaaggtggaggacaagcggcccgccgccaccaagaaggccggccaggccaagaagaagaagatggccgccttcaagcccaaccccatcaactacatcctgggcctggacatcggcatcgcctccgtgggctgggccatggtggagatcgacgaggaggagaaccccatccggctgatcgacctgggcgtgcgggtgttcgagcgggccgaggtgcccaagaccggcgactccctggccatggcccggcggctggcccggtccgtgcggcggctgacccggcggcgggcccaccggctgctgcgggcccggcggctgctgaagcgggagggcgtgctgcaggccgccgacttcgacgagaacggcctgatcaagtccctgcccaacaccccctggcagctgcgggccgccgccctggaccggaagctgacccccctggagtggtccgccgtgctgctgcacctgatcaagcaccggggctacctgtcccagcggaagaacgagggcgagaccgccgacaaggagctgggcgccctgctgaagggcgtggccaacaacgcccacgccctgcagaccggcgacttccggacccccgccgagctggccctgaacaagttcgagaaggagtccggccacatccggaaccagcggggcgactactcccacaccttctcccggaaggacctgcaggccgagctgatcctgctgttcgagaagcagaaggagttcggcaacccccacgtgtccggcggcctgaaggagggcatcgagaccctgctgatgacccagcggcccgccctgtccggcgacgccgtgcagaagatgctgggccactgcaccttcgagcccgccgagcccaaggccgccaagaacacctacaccgccgagcggttcatctggctgaccaagctgaacaacctgcggatcctggagcagggctccgagcggcccctgaccgacaccgagcgggccaccctgatggacgagccctaccggaagtccaagctgacctacgcccaggcccggaagctgctgggcctggaggacaccgccttcttcaagggcctgcggtacggcaaggacaacgccgaggcctccaccctgatggagatgaaggcctaccacgccatctcccgggccctggagaaggagggcctgaaggacaagaagtcccccctgaacctgtcctccgagctgcaggacgagatcggcaccgccttctccctgttcaagaccgacgaggacatcaccggccggctgaaggaccgggtgcagcccgagatcctggaggccctgctgaagcacatctccttcgacaagttcgtgcagatctccctgaaggccctgcggcggatcgtgcccctgatggagcagggcaagcggtacgacgaggcctgcgccgagatctacggcgaccactacggcaagaagaacaccgaggagaagatctacctgccccccatccccgccgacgagatccggaaccccgtggtgctgcgggccctgtcccaggcccggaaggtgatcaacggcgtggtgcggcggtacggctcccccgcccggatccacatcgagaccgcccgggaggtgggcaagtccttcaaggaccggaaggagatcgagaagcggcaggaggagaaccggaaggaccgggagaaggccgccgccaagttccgggagtacttccccaacttcgtgggcgagcccaagtccaaggacatcctgaagctgcggctgtacgagcagcagcacggcaagtgcctgtactccggcaaggagatcaacctggtgcggctgaacgagaagggctacgtggagatcgaccacgccctgcccttctcccggacctgggacgactccttcaacaacaaggtgctggtgctgggctccgagaaccagaacaagggcaaccagaccccctacgagtacttcaacggcaaggacaactcccgggagtggcaggagttcaaggcccgggtggagacctcccggttcccccggtccaagaagcagcggatcctgctgcagaagttcgacgaggacggcttcaaggagtgcaacctgaacgacacccggtacgtgaaccggttcctgtgccagttcgtggccgaccacatcctgctgaccggcaagggcaagcggcgggtgttcgcctccaacggccagatcaccaacctgctgcggggcttctggggcctgcggaaggtgcgggccgagaacgaccggcaccacgccctggacgccgtggtggtggcctgctccaccgtggccatgcagcagaagatcacccggttcgtgcggtacaaggagatgaacgccttcgacggcaagaccatcgacaaggagaccggcaaggtgctgcaccagaagacccacttcccccagccctgggagttcttcgcccaggaggtgatgatccgggtgttcggcaagcccgacggcaagcccgagttcgaggaggccgacacccccgagaagctgcggaccctgctggccgagaagctgtcctcccggcccgaggccgtgcacgagtacgtgacccccctgttcgtgtcccgggcccccaaccggaagatgtccggcgcccacaaggacaccctgcggtccgccaagcggttcgtgaagcacaacgagaagatctccgtgaagcgggtgtggctgaccgagatcaagctggccgacctggagaacatggtgaactacaagaacggccgggagatcgagctgtacgaggccctgaaggcccggctggaggcctacggcggcaacgccaagcaggccttcgaccccaaggacaaccccttctacaagaagggcggccagctggtgaaggccgtgcgggtggagaagacccaggagtccggcgtgctgctgaacaagaagaacgcctacaccatcgccgacaacggcgacatggtgcgggtggacgtgttctgcaaggtggacaagaagggcaagaaccagtacttcatcgtgcccatctacgcctggcaggtggccgagaacatcctgcccgacatcgactgcaagggctaccggatcgacgactcctacaccttctgcttctccctgcacaagtacgacctgatcgccttccagaaggacgagaagtccaaggtggagttcgcctactacatcaactgcgactcctccaacggccggttctacctggcctggcacgacaagggctccaaggagcagcagttccggatctccacccagaacctggtgctgatccagaagtaccaggtgaacgagctgggcaaggagatccggccctgccggctgaagaagcggccccccgtgcgggaggacaagcggcccgccgccaccaagaaggccggccaggccaagaagaagaagtacccctacgacgtgcccgactacgccggctacccctacgacgtgcccgactacgccggctcctacccctacgacgtgcccgactacgccgccgcccccgccgccaagaagaagaagctggactagctagcaccagcctcaagaacacccgaatggagtctctaagctacataataccaacttacactttacaaaatgttgtcccccaaaatgtagccattcgtatctgctcctaataaaaagaaagtttcttcacattctctcgagaaaaaaaaaaaatggaaaaaaaaaaaacggaaaaaaaaaaaaggtaaaaaaaaaaaatataaaaaaaaaaaacataaaaaaaaaaaacgaaaaaaaaaaaacgtaaaaaaaaaaaactcaaaaaaaaaaaagataaaaaaaaaaaacctaaaaaaaaaaaatgtaaaaaaaaaaaagggaaaaaaaaaaaacgcaaaaaaaaaaaacacaaaaaaaaaaaatgcaaaaaaaaaaaatcgaaaaaaaaaaaatctaaaaaaaaaaaacgaaaaaaaaaaaacccaaaaaaaaaaaagacaaaaaaaaaaaatagaaaaaaaaaaaagttaaaaaaaaaaaactgaaaaaaaaaaaatttaaaaaaaaaaaatctag

SEQ ID NO: 21 - DNA, 3862 bp, synthetic construct
  misc_feature 1..3862: note = Synthetic
  source 1..3862: mol_type = other DNA
gggaagctcagaataaacgctcaactttggccggatctgccaccatggccgccttcaagcccaaccccatcaactacatcctgggcctggacatcggcatcgcctccgtgggctgggccatggtggagatcgacgaggaggagaaccccatccggctgatcgacctgggcgtgcgggtgttcgagcgggccgaggtgcccaagaccggcgactccctggccatggcccggcggctggcccggtccgtgcggcggctgacccggcggcgggcccaccggctgctgcgggcccggcggctgctgaagcgggagggcgtgctgcaggccgccgacttcgacgagaacggcctgatcaagtccctgcccaacaccccctggcagctgcgggccgccgccctggaccggaagctgacccccctggagtggtccgccgtgctgctgcacctgatcaagcaccggggctacctgtcccagcggaagaacgagggcgagaccgccgacaaggagctgggcgccctgctgaagggcgtggccaacaacgcccacgccctgcagaccggcgacttccggacccccgccgagctggccctgaacaagttcgagaaggagtccggccacatccggaaccagcggggcgactactcccacaccttctcccggaaggacctgcaggccgagctgatcctgctgttcgagaagcagaaggagttcggcaacccccacgtgtccggcggcctgaaggagggcatcgagaccctgctgatgacccagcggcccgccctgtccggcgacgccgtgcagaagatgctgggccactgcaccttcgagcccgccgagcccaaggccgccaagaacacctacaccgccgagcggttcatctggctgaccaagctgaacaacctgcggatcctggagcagggctccgagcggcccctgaccgacaccgagcgggccaccctgatggacgagccctaccggaagtccaagctgacctacgcccaggcccggaagctgctgggcctggaggacaccgccttcttcaagggcctgcggtacggcaaggacaacgccgaggcctccaccctgatggagatgaaggcctaccacgccatctcccgggccctggagaaggagggcctgaaggacaagaagtcccccctgaacctgtcctccgagctgcaggacgagatcggcaccgccttctccctgttcaagaccgacgaggacatcaccggccggctgaaggaccgggtgcagcccgagatcctggaggccctgctgaagcacatctccttcgacaagttcgtgcagatctccctgaaggccctgcggcggatcgtgcccctgatggagcagggcaagcggtacgacgaggcctgcgccgagatctacggcgaccactacggcaagaagaacaccgaggagaagatctacctgccccccatccccgccgacgagatccggaaccccgtggtgctgcgggccctgtcccaggcccggaaggtgatcaacggcgtggtgcggcggtacggctcccccgcccggatccacatcgagaccgcccgggaggtgggcaagtccttcaaggaccggaaggagatcgagaagcggcaggaggagaaccggaaggaccgggagaaggccgccgccaagttccgggagtacttccccaacttcgtgggcgagcccaagtccaaggacatcctgaagctgcggctgtacgagcagcagcacggcaagtgcctgtactccggcaaggagatcaacctggtgcggctgaacgagaagggctacgtggagatcgaccacgccctgcccttctcccggacctgggacgactccttcaacaacaaggtgctggtgctgggctccgagaaccagaacaagggcaaccagaccccctacgagtacttcaacggcaaggacaactcccgggagtggcaggagttcaaggcccgggtggagacctcccggttcccccggtccaagaagcagcggatcctgctgcagaagttcgacgaggacggcttcaaggagtgcaacctgaacgacacccggtacgtgaaccggttcctgtgccagttcgtggccgaccacatcctgctgaccggcaagggcaagcggcgggtgttcgcctccaacggccagatcaccaacctgctgcggggcttctggggcctgcggaaggtgcgggccgagaacgaccggcaccacgccctggacgccgtggtggtggcctgctccaccgtggccatgcagcagaagatcacccggttcgtgcggtacaaggagatgaacgccttcgacggcaagaccatcgacaaggagaccggcaaggtgctgcaccagaagacccacttcccccagccctgggagttcttcgcccaggaggtgatgatccgggtgttcggcaagcccgacggcaagcccgagttcgaggaggccgacacccccgagaagctgcggaccctgctggccgagaagctgtcctcccggcccgaggccgtgcacgagtacgtgacccccctgttcgtgtcccgggcccccaaccggaagatgtccggcgcccacaaggacaccctgcggtccgccaagcggttcgtgaagcacaacgagaagatctccgtgaagcgggtgtggctgaccgagatcaagctggccgacctggagaacatggtgaactacaagaacggccgggagatcgagctgtacgaggccctgaaggcccggctggaggcctacggcggcaacgccaagcaggccttcgaccccaaggacaaccccttctacaagaagggcggccagctggtgaaggccgtgcgggtggagaagacccaggagtccggcgtgctgctgaacaagaagaacgcctacaccatcgccgacaacggcgacatggtgcgggtggacgtgttctgcaaggtggacaagaagggcaagaaccagtacttcatcgtgcccatctacgcctggcaggtggccgagaacatcctgcccgacatcgactgcaagggctaccggatcgacgactcctacaccttctgcttctccctgcacaagtacgacctgatcgccttccagaaggacgagaagtccaaggtggagttcgcctactacatcaactgcgactcctccaacggccggttctacctggcctggcacgacaagggctccaaggagcagcagttccggatctccacccagaacctggtgctgatccagaagtaccaggtgaacgagctgggcaaggagatccggccctgccggctgaagaagcggccccccgtgcggtccggaaagcggaccgccgacggctccggaggaggaagccccaagaagaagcggaaggtgtagctagcaccagcctcaagaacacccgaatggagtctctaagctacataataccaacttacactttacaaaatgttgtcccccaaaatgtagccattcgtatctgctcctaataaaaagaaagtttcttcacattctctcgagaaaaaaaaaaaatggaaaaaaaaaaaacggaaaaaaaaaaaaggtaaaaaaaaaaaatataaaaaaaaaaaacataaaaaaaaaaaacgaaaaaaaaaaaacgtaaaaaaaaaaactcaaaaaaaaaaagataaaaaaaaaaaacctaaaaaaaaaaaatgtaaaaaaaaaaaagggaaaaaaaaaaaacgcaaaaaaaaaaaacacaaaaaaaaaaaatgcaaaaaaaaaaaatcgaaaaaaaaaaaatctaaaaaaaaaaaacgaaaaaaaaaaaacccaaaaaaaaaaaagacaaaaaaaaaaaatagaaaaaaaaaaagttaaaaaaaaaaaactgaaaaaaaaaaaatttaaaaaaaaaaaat

SEQ ID NO: 22 - DNA, 3863 bp, synthetic construct
  misc_feature 1..3863: note = Synthetic
  source 1..3863: mol_type = other DNA
gggaagctcagaataaacgctcaactttggccggatctgccaccatggacggctccggcggcggctcccccaagaagaagcggaaggtgggcggctccggcggcggcgccgccttcaagcccaaccccatcaactacatcctgggcctggacatcggcatcgcctccgtgggctgggccatggtggagatcgacgaggaggagaaccccatccggctgatcgacctgggcgtgcgggtgttcgagcgggccgaggtgcccaagaccggcgactccctggccatggcccggcggctggcccggtccgtgcggcggctgacccggcggcgggcccaccggctgctgcgggcccggcggctgctgaagcgggagggcgtgctgcaggccgccgacttcgacgagaacggcctgatcaagtccctgcccaacaccccctggcagctgcgggccgccgccctggaccggaagctgacccccctggagtggtccgccgtgctgctgcacctgatcaagcaccggggctacctgtcccagcggaagaacgagggcgagaccgccgacaaggagctgggcgccctgctgaagggcgtggccaacaacgcccacgccctgcagaccggcgacttccggacccccgccgagctggccctgaacaagttcgagaaggagtccggccacatccggaaccagcggggcgactactcccacaccttctcccggaaggacctgcaggccgagctgatcctgctgttcgagaagcagaaggagttcggcaacccccacgtgtccggcggcctgaaggagggcatcgagaccctgctgatgacccagcggcccgccctgtccggcgacgccgtgcagaagatgctgggccactgcaccttcgagcccgccgagcccaaggccgccaagaacacctacaccgccgagcggttcatctggctgaccaagctgaacaacctgcggatcctggagcagggctccgagcggcccctgaccgacaccgagcgggccaccctgatggacgagccctaccggaagtccaagctgacctacgcccaggcccggaagctgctgggcctggaggacaccgccttcttcaagggcctgcggtacggcaaggacaacgccgaggcctccaccctgatggagatgaaggcctaccacgccatctcccgggccctggagaaggagggcctgaaggacaagaagtcccccctgaacctgtcctccgagctgcaggacgagatcggcaccgccttctccctgttcaagaccgacgaggacatcaccggccggctgaaggaccgggtgcagcccgagatcctggaggccctgctgaagcacatctccttcgacaagttcgtgcagatctccctgaaggccctgcggcggatcgtgcccctgatggagcagggcaagcggtacgacgaggcctgcgccgagatctacggcgaccactacggcaagaagaacaccgaggagaagatctacctgccccccatccccgccgacgagatccggaaccccgtggtgctgcgggccctgtcccaggcccggaaggtgatcaacggcgtggtgcggcggtacggctcccccgcccggatccacatcgagaccgcccgggaggtgggcaagtccttcaaggaccggaaggagatcgagaagcggcaggaggagaaccggaaggaccgggagaaggccgccgccaagttccgggagtacttccccaacttcgtgggcgagcccaagtccaaggacatcctgaagctgcggctgtacgagcagcagcacggcaagtgcctgtactccggcaaggagatcaacctggtgcggctgaacgagaagggctacgtggagatcgaccacgccctgcccttctcccggacctgggacgactccttcaacaacaaggtgctggtgctgggctccgagaaccagaacaagggcaaccagaccccctacgagtacttcaacggcaaggacaactcccgggagtggcaggagttcaaggcccgggtggagacctcccggttcccccggtccaagaagcagcggatcctgctgcagaagttcgacgaggacggcttcaaggagtgcaacctgaacgacacccggtacgtgaaccggttcctgtgccagttcgtggccgaccacatcctgctgaccggcaagggcaagcggcgggtgttcgcctccaacggccagatcaccaacctgctgcggggcttctggggcctgcggaaggtgcgggccgagaacgaccggcaccacgccctggacgccgtggtggtggcctgctccaccgtggccatgcagcagaagatcacccggttcgtgcggtacaaggagatgaacgccttcgacggcaagaccatcgacaaggagaccggcaaggtgctgcaccagaagacccacttcccccagccctgggagttcttcgcccaggaggtgatgatccgggtgttcggcaagcccgacggcaagcccgagttcgaggaggccgacacccccgagaagctgcggaccctgctggccgagaagctgtcctcccggcccgaggccgtgcacgagtacgtgacccccctgttcgtgtcccgggcccccaaccggaagatgtccggcgcccacaaggacaccctgcggtccgccaagcggttcgtgaagcacaacgagaagatctccgtgaagcgggtgtggctgaccgagatcaagctggccgacctggagaacatggtgaactacaagaacggccgggagatcgagctgtacgaggccctgaaggcccggctggaggcctacggcggcaacgccaagcaggccttcgaccccaaggacaaccccttctacaagaagggcggccagctggtgaaggccgtgcgggtggagaagacccaggagtccggcgtgctgctgaacaagaagaacgcctacaccatcgccgacaacggcgacatggtgcgggtggacgtgttctgcaaggtggacaagaagggcaagaaccagtacttcatcgtgcccatctacgcctggcaggtggccgagaacatcctgcccgacatcgactgcaagggctaccggatcgacgactcctacaccttctgcttctccctgcacaagtacgacctgatcgccttccagaaggacgagaagtccaaggtggagttcgcctactacatcaactgcgactcctccaacggccggttctacctggcctggcacgacaagggctccaaggagcagcagttccggatctccacccagaacctggtgctgatccagaagtaccaggtgaacgagctgggcaaggagatccggccctgccggctgaagaagcggccccccgtgcggtagctagcaccagcctcaagaacacccgaatggagtctctaagctacataataccaacttacactttacaaaatgttgtcccccaaaatgtagccattcgtatctgctcctaataaaaagaaagtttcttcacattctctcgagaaaaaaaaaaaatggaaaaaaaaaaaacggaaaaaaaaaaaaggtaaaaaaaaaaaatataaaaaaaaaaaacataaaaaaaaaaaacgaaaaaaaaaaaacgtaaaaaaaaaaaactcaaaaaaaaaaagataaaaaaaaaaaacctaaaaaaaaaaaatgtaaaaaaaaaaaagggaaaaaaaaaaaacgcaaaaaaaaaaaacacaaaaaaaaaaaatgcaaaaaaaaaaaatcgaaaaaaaaaaaatctaaaaaaaaaaaacgaaaaaaaaaaaacccaaaaaaaaaaaagacaaaaaaaaaaaatagaaaaaaaaaaagttaaaaaaaaaaaactgaaaaaaaaaaaatttaaaaaaaaaaaat

SEQ ID NO: 23 - RNA, 3926 nt, synthetic construct
  misc_feature 1..3926: note = Synthetic
  source 1..3926: mol_type = other RNA
gggaagctcagaataaacgctcaactttggccggatctgccaccatggacggctccggcggcggctcccccaagaagaagcggaaggtgggcggctccggcggcggcgccgccttcaagcccaaccccatcaactacatcctgggcctggacatcggcatcgcctccgtgggctgggccatggtggagatcgacgaggaggagaaccccatccggctgatcgacctgggcgtgcgggtgttcgagcgggccgaggtgcccaagaccggcgactccctggccatggcccggcggctggcccggtccgtgcggcggctgacccggcggcgggcccaccggctgctgcgggcccggcggctgctgaagcgggagggcgtgctgcaggccgccgacttcgacgagaacggcctgatcaagtccctgcccaacaccccctggcagctgcgggccgccgccctggaccggaagctgacccccctggagtggtccgccgtgctgctgcacctgatcaagcaccggggctacctgtcccagcggaagaacgagggcgagaccgccgacaaggagctgggcgccctgctgaagggcgtggccaacaacgcccacgccctgcagaccggcgacttccggacccccgccgagctggccctgaacaagttcgagaaggagtccggccacatccggaaccagcggggcgactactcccacaccttctcccggaaggacctgcaggccgagctgatcctgctgttcgagaagcagaaggagttcggcaacccccacgtgtccggcggcctgaaggagggcatcgagaccctgctgatgacccagcggcccgccctgtccggcgacgccgtgcagaagatgctgggccactgcaccttcgagcccgccgagcccaaggccgccaagaacacctacaccgccgagcggttcatctggctgaccaagctgaacaacctgcggatcctggagcagggctccgagcggcccctgaccgacaccgagcgggccaccctgatggacgagccctaccggaagtccaagctgacctacgcccaggcccggaagctgctgggcctggaggacaccgccttcttcaagggcctgcggtacggcaaggacaacgccgaggcctccaccctgatggagatgaaggcctaccacgccatctcccgggccctggagaaggagggcctgaaggacaagaagtcccccctgaacctgtcctccgagctgcaggacgagatcggcaccgccttctccctgttcaagaccgacgaggacatcaccggccggctgaaggaccgggtgcagcccgagatcctggaggccctgctgaagcacatctccttcgacaagttcgtgcagatctccctgaaggccctgcggcggatcgtgcccctgatggagcagggcaagcggtacgacgaggcctgcgccgagatctacggcgaccactacggcaagaagaacaccgaggagaagatctacctgccccccatccccgccgacgagatccggaaccccgtggtgctgcgggccctgtcccaggcccggaaggtgatcaacggcgtggtgcggcggtacggctcccccgcccggatccacatcgagaccgcccgggaggtgggcaagtccttcaaggaccggaaggagatcgagaagcggcaggaggagaaccggaaggaccgggagaaggccgccgccaagttccgggagtacttccccaacttcgtgggcgagcccaagtccaaggacatcctgaagctgcggctgtacgagcagcagcacggcaagtgcctgtactccggcaaggagatcaacctggtgcggctgaacgagaagggctacgtggagatcgaccacgccctgcccttctcccggacctgggacgactccttcaacaacaaggtgctggtgctgggctccgagaaccagaacaagggcaaccagaccccctacgagtacttcaacggcaaggacaactcccgggagtggcaggagttcaaggcccgggtggagacctcccggttcccccggtccaagaagcagcggatcctgctgcagaagttcgacgaggacggcttcaaggagtgcaacctgaacgacacccggtacgtgaaccggttcctgtgccagttcgtggccgaccacatcctgctgaccggcaagggcaagcggcgggtgttcgcctccaacggccagatcaccaacctgctgcggggcttctggggcctgcggaaggtgcgggccgagaacgaccggcaccacgccctggacgccgtggtggtggcctgctccaccgtggccatgcagcagaagatcacccggttcgtgcggtacaaggagatgaacgccttcgacggcaagaccatcgacaaggagaccggcaaggtgctgcaccagaagacccacttcccccagccctgggagttcttcgcccaggaggtgatgatccgggtgttcggcaagcccgacggcaagcccgagttcgaggaggccgacacccccgagaagctgcggaccctgctggccgagaagctgtcctcccggcccgaggccgtgcacgagtacgtgacccccctgttcgtgtcccgggcccccaaccggaagatgtccggcgcccacaaggacaccctgcggtccgccaagcggttcgtgaagcacaacgagaagatctccgtgaagcgggtgtggctgaccgagatcaagctggccgacctggagaacatggtgaactacaagaacggccgggagatcgagctgtacgaggccctgaaggcccggctggaggcctacggcggcaacgccaagcaggccttcgaccccaaggacaaccccttctacaagaagggcggccagctggtgaaggccgtgcgggtggagaagacccaggagtccggcgtgctgctgaacaagaagaacgcctacaccatcgccgacaacggcgacatggtgcgggtggacgtgttctgcaaggtggacaagaagggcaagaaccagtacttcatcgtgcccatctacgcctggcaggtggccgagaacatcctgcccgacatcgactgcaagggctaccggatcgacgactcctacaccttctgcttctccctgcacaagtacgacctgatcgccttccagaaggacgagaagtccaaggtggagttcgcctactacatcaactgcgactcctccaacggccggttctacctggcctggcacgacaagggctccaaggagcagcagttccggatctccacccagaacctggtgctgatccagaagtaccaggtgaacgagctgggcaaggagatccggccctgccggctgaagaagcggccccccgtgcggtccgagtccgccacccccgagtccgtgtccggctggcggctgttcaagaagatctcctagctagcaccagcctcaagaacacccgaatggagtctctaagctacataataccaacttacactttacaaaatgttgtcccccaaaatgtagccattcgtatctgctcctaataaaaagaaagtttcttcacattctctcgagaaaaaaaaaaaatggaaaaaaaaaaaacggaaaaaaaaaaaaggtaaaaaaaaaaaatataaaaaaaaaaaacataaaaaaaaaaaacgaaaaaaaaaaaacgtaaaaaaaaaaaactcaaaaaaaaaaaagataaaaaaaaaaaacctaaaaaaaaaaaatgtaaaaaaaaaaaagggaaaaaaaaaaaacgcaaaaaaaaaaaacacaaaaaaaaaaaatgcaaaaaaaaaaaatcgaaaaaaaaaaaatctaaaaaaaaaaaacgaaaaaaaaaaaacccaaaaaaaaaaaagacaaaaaaaaaaaatagaaaaaaaaaaaagttaaaaaaaaaaaactgaaaaaaaaaaaatttaaaaaaaaaaaatctag

SEQ ID NO: 24 - RNA, 3933 nt, synthetic construct
  misc_feature 1..3933: note = Synthetic
  source 1..3933: mol_type = other RNA
gggaagctcagaataaacgctcaactttggccggatctgccaccatggacggctccggcggcggctcccccaagaagaagcggaaggtgggcggctccggcggcggcgccgccttcaagcccaaccccatcaactacatcctgggcctggacatcggcatcgcctccgtgggctgggccatggtggagatcgacgaggaggagaaccccatccggctgatcgacctgggcgtgcgggtgttcgagcgggccgaggtgcccaagaccggcgactccctggccatggcccggcggctggcccggtccgtgcggcggctgacccggcggcgggcccaccggctgctgcgggcccggcggctgctgaagcgggagggcgtgctgcaggccgccgacttcgacgagaacggcctgatcaagtccctgcccaacaccccctggcagctgcgggccgccgccctggaccggaagctgacccccctggagtggtccgccgtgctgctgcacctgatcaagcaccggggctacctgtcccagcggaagaacgagggcgagaccgccgacaaggagctgggcgccctgctgaagggcgtggccaacaacgcccacgccctgcagaccggcgacttccggacccccgccgagctggccctgaacaagttcgagaaggagtccggccacatccggaaccagcggggcgactactcccacaccttctcccggaaggacctgcaggccgagctgatcctgctgttcgagaagcagaaggagttcggcaacccccacgtgtccggcggcctgaaggagggcatcgagaccctgctgatgacccagcggcccgccctgtccggcgacgccgtgcagaagatgctgggccactgcaccttcgagcccgccgagcccaaggccgccaagaacacctacaccgccgagcggttcatctggctgaccaagctgaacaacctgcggatcctggagcagggctccgagcggcccctgaccgacaccgagcgggccaccctgatggacgagccctaccggaagtccaagctgacctacgcccaggcccggaagctgctgggcctggaggacaccgccttcttcaagggcctgcggtacggcaaggacaacgccgaggcctccaccctgatggagatgaaggcctaccacgccatctcccgggccctggagaaggagggcctgaaggacaagaagtcccccctgaacctgtcctccgagctgcaggacgagatcggcaccgccttctccctgttcaagaccgacgaggacatcaccggccggctgaaggaccgggtgcagcccgagatcctggaggccctgctgaagcacatctccttcgacaagttcgtgcagatctccctgaaggccctgcggcggatcgtgcccctgatggagcagggcaagcggtacgacgaggcctgcgccgagatctacggcgaccactacggcaagaagaacaccgaggagaagatctacctgccccccatccccgccgacgagatccggaaccccgtggtgctgcgggccctgtcccaggcccggaaggtgatcaacggcgtggtgcggcggtacggctcccccgcccggatccacatcgagaccgcccgggaggtgggcaagtccttcaaggaccggaaggagatcgagaagcggcaggaggagaaccggaaggaccgggagaaggccgccgccaagttccgggagtacttccccaacttcgtgggcgagcccaagtccaaggacatcctgaagctgcggctgtacgagcagcagcacggcaagtgcctgtactccggcaaggagatcaacctggtgcggctgaacgagaagggctacgtggagatcgaccacgccctgcccttctcccggacctgggacgactccttcaacaacaaggtgctggtgctgggctccgagaaccagaacaagggcaaccagaccccctacgagtacttcaacggcaaggacaactcccgggagtggcaggagttcaaggcccgggtggagacctcccggttcccccggtccaagaagcagcggatcctgctgcagaagttcgacgaggacggcttcaaggagtgcaacctgaacgacacccggtacgtgaaccggttcctgtgccagttcgtggccgaccacatcctgctgaccggcaagggcaagcggcgggtgttcgcctccaacggccagatcaccaacctgctgcggggcttctggggcctgcggaaggtgcgggccgagaacgaccggcaccacgccctggacgccgtggtggtggcctgctccaccgtggccatgcagcagaagatcacccggttcgtgcggtacaaggagatgaacgccttcgacggcaagaccatcgacaaggagaccggcaaggtgctgcaccagaagacccacttcccccagccctgggagttcttcgcccaggaggtgatgatccgggtgttcggcaagcccgacggcaagcccgagttcgaggaggccgacacccccgagaagctgcggaccctgctggccgagaagctgtcctcccggcccgaggccgtgcacgagtacgtgacccccctgttcgtgtcccgggcccccaaccggaagatgtccggcgcccacaaggacaccctgcggtccgccaagcggttcgtgaagcacaacgagaagatctccgtgaagcgggtgtggctgaccgagatcaagctggccgacctggagaacatggtgaactacaagaacggccgggagatcgagctgtacgaggccctgaaggcccggctggaggcctacggcggcaacgccaagcaggccttcgaccccaaggacaaccccttctacaagaagggcggccagctggtgaaggccgtgcgggtggagaagacccaggagtccggcgtgctgctgaacaagaagaacgcctacaccatcgccgacaacggcgacatggtgcgggtggacgtgttctgcaaggtggacaagaagggcaagaaccagtacttcatcgtgcccatctacgcctggcaggtggccgagaacatcctgcccgacatcgactgcaagggctaccggatcgacgactcctacaccttctgcttctccctgcacaagtacgacctgatcgccttccagaaggacgagaagtccaaggtggagttcgcctactacatcaactgcgactcctccaacggccggttctacctggcctggcacgacaagggctccaaggagcagcagttccggatctccacccagaacctggtgctgatccagaagtaccaggtgaacgagctgggcaaggagatccggccctgccggctgaagaagcggccccccgtgcggtccggaaagcggaccgccgacggctccggaggaggaagccccgccgccaagaagaagaagctggactagctagcaccagcctcaagaacacccgaatggagtctctaagctacataataccaacttacactttacaaaatgttgtcccccaaaatgtagccattcgtatctgctcctaataaaaagaaagtttcttcacattctctcgagaaaaaaaaaaaatggaaaaaaaaaaaacggaaaaaaaaaaaaggtaaaaaaaaaaaatataaaaaaaaaaaacataaaaaaaaaaaacgaaaaaaaaaaaacgtaaaaaaaaaaaactcaaaaaaaaaaagataaaaaaaaaaaacctaaaaaaaaaaaatgtaaaaaaaaaaaagggaaaaaaaaaaaacgcaaaaaaaaaaaacacaaaaaaaaaaaatgcaaaaaaaaaaaatcgaaaaaaaaaaaatctaaaaaaaaaaaacgaaaaaaaaaaaacccaaaaaaaaaaaagacaaaaaaaaaaaatagaaaaaaaaaaagttaaaaaaaaaaaactgaaaaaaaaaaaatttaaaaaaaaaaaatctag

SEQ ID NO: 25 - RNA, 3921 nt, synthetic construct
  misc_feature 1..3921: note = Synthetic
  source 1..3921: mol_type = other RNA
gggaagctcagaataaacgctcaactttggccggatctgccaccatggacggctccggcggcggctcccccaagaagaagcggaaggtggaggacaagcggcccgccgccaccaagaaggccggccaggccaagaagaagaagggcggctccggcggcggcgccgccttcaagcccaaccccatcaactacatcctgggcctggacatcggcatcgcctccgtgggctgggccatggtggagatcgacgaggaggagaaccccatccggctgatcgacctgggcgtgcgggtgttcgagcgggccgaggtgcccaagaccggcgactccctggccatggcccggcggctggcccggtccgtgcggcggctgacccggcggcgggcccaccggctgctgcgggcccggcggctgctgaagcgggagggcgtgctgcaggccgccgacttcgacgagaacggcctgatcaagtccctgcccaacaccccctggcagctgcgggccgccgccctggaccggaagctgacccccctggagtggtccgccgtgctgctgcacctgatcaagcaccggggctacctgtcccagcggaagaacgagggcgagaccgccgacaaggagctgggcgccctgctgaagggcgtggccaacaacgcccacgccctgcagaccggcgacttccggacccccgccgagctggccctgaacaagttcgagaaggagtccggccacatccggaaccagcggggcgactactcccacaccttctcccggaaggacctgcaggccgagctgatcctgctgttcgagaagcagaaggagttcggcaacccccacgtgtccggcggcctgaaggagggcatcgagaccctgctgatgacccagcggcccgccctgtccggcgacgccgtgcagaagatgctgggccactgcaccttcgagcccgccgagcccaaggccgccaagaacacctacaccgccgagcggttcatctggctgaccaagctgaacaacctgcggatcctggagcagggctccgagcggcccctgaccgacaccgagcgggccaccctgatggacgagccctaccggaagtccaagctgacctacgcccaggcccggaagctgctgggcctggaggacaccgccttcttcaagggcctgcggtacggcaaggacaacgccgaggcctccaccctgatggagatgaaggcctaccacgccatctcccgggccctggagaaggagggcctgaaggacaagaagtcccccctgaacctgtcctccgagctgcaggacgagatcggcaccgccttctccctgttcaagaccgacgaggacatcaccggccggctgaaggaccgggtgcagcccgagatcctggaggccctgctgaagcacatctccttcgacaagttcgtgcagatctccctgaaggccctgcggcggatcgtgcccctgatggagcagggcaagcggtacgacgaggcctgcgccgagatctacggcgaccactacggcaagaagaacaccgaggagaagatctacctgccccccatccccgccgacgagatccggaaccccgtggtgctgcgggccctgtcccaggcccggaaggtgatcaacggcgtggtgcggcggtacggctcccccgcccggatccacatcgagaccgcccgggaggtgggcaagtccttcaaggaccggaaggagatcgagaagcggcaggaggagaaccggaaggaccgggagaaggccgccgccaagttccgggagtacttccccaacttcgtgggcgagcccaagtccaaggacatcctgaagctgcggctgtacgagcagcagcacggcaagtgcctgtactccggcaaggagatcaacctggtgcggctgaacgagaagggctacgtggagatcgaccacgccctgcccttctcccggacctgggacgactccttcaacaacaaggtgctggtgctgggctccgagaaccagaacaagggcaaccagaccccctacgagtacttcaacggcaaggacaactcccgggagtggcaggagttcaaggcccgggtggagacctcccggttcccccggtccaagaagcagcggatcctgctgcagaagttcgacgaggacggcttcaaggagtgcaacctgaacgacacccggtacgtgaaccggttcctgtgccagttcgtggccgaccacatcctgctgaccggcaagggcaagcggcgggtgttcgcctccaacggccagatcaccaacctgctgcggggcttctggggcctgcggaaggtgcgggccgagaacgaccggcaccacgccctggacgccgtggtggtggcctgctccaccgtggccatgcagcagaagatcacccggttcgtgcggtacaaggagatgaacgccttcgacggcaagaccatcgacaaggagaccggcaaggtgctgcaccagaagacccacttcccccagccctgggagttcttcgcccaggaggtgatgatccgggtgttcggcaagcccgacggcaagcccgagttcgaggaggccgacacccccgagaagctgcggaccctgctggccgagaagctgtcctcccggcccgaggccgtgcacgagtacgtgacccccctgttcgtgtcccgggcccccaaccggaagatgtccggcgcccacaaggacaccctgcggtccgccaagcggttcgtgaagcacaacgagaagatctccgtgaagcgggtgtggctgaccgagatcaagctggccgacctggagaacatggtgaactacaagaacggccgggagatcgagctgtacgaggccctgaaggcccggctggaggcctacggcggcaacgccaagcaggccttcgaccccaaggacaaccccttctacaagaagggcggccagctggtgaaggccgtgcgggtggagaagacccaggagtccggcgtgctgctgaacaagaagaacgcctacaccatcgccgacaacggcgacatggtgcgggtggacgtgttctgcaaggtggacaagaagggcaagaaccagtacttcatcgtgcccatctacgcctggcaggtggccgagaacatcctgcccgacatcgactgcaagggctaccggatcgacgactcctacaccttctgcttctccctgcacaagtacgacctgatcgccttccagaaggacgagaagtccaaggtggagttcgcctactacatcaactgcgactcctccaacggccggttctacctggcctggcacgacaagggctccaaggagcagcagttccggatctccacccagaacctggtgctgatccagaagtaccaggtgaacgagctgggcaaggagatccggccctgccggctgaagaagcggccccccgtgcggtagctagcaccagcctcaagaacacccgaatggagtctctaagctacataataccaacttacactttacaaaatgttgtcccccaaaatgtagccattcgtatctgctcctaataaaaagaaagtttcttcacattctctcgagaaaaaaaaaaaatggaaaaaaaaaaaacggaaaaaaaaaaaaggtaaaaaaaaaaaatataaaaaaaaaaaacataaaaaaaaaaaacgaaaaaaaaaaaacgtaaaaaaaaaaaactcaaaaaaaaaaagataaaaaaaaaaaacctaaaaaaaaaaaatgtaaaaaaaaaaaagggaaaaaaaaaaaacgcaaaaaaaaaaaacacaaaaaaaaaaaatgcaaaaaaaaaaaatcgaaaaaaaaaaaatctaaaaaaaaaaaacgaaaaaaaaaaaacccaaaaaaaaaaaagacaaaaaaaaaaaatagaaaaaaaaaaagttaaaaaaaaaaaactgaaaaaaaaaaaatttaaaaaaaaaaaatctag

SEQ ID NO: 26 - RNA, 3980 nt, synthetic construct
  misc_feature 1..3980: note = Synthetic
  source 1..3980: mol_type = other RNA
gggaagctcagaataaacgctcaactttggccggatctgccaccatggacggctccggcggcggctcccccaagaagaagcggaaggtggaggacaagcggcccgccgccaccaagaaggccggccaggccaagaagaagaagggcggctccggcggcggcgccgccttcaagcccaaccccatcaactacatcctgggcctggacatcggcatcgcctccgtgggctgggccatggtggagatcgacgaggaggagaaccccatccggctgatcgacctgggcgtgcgggtgttcgagcgggccgaggtgcccaagaccggcgactccctggccatggcccggcggctggcccggtccgtgcggcggctgacccggcggcgggcccaccggctgctgcgggcccggcggctgctgaagcgggagggcgtgctgcaggccgccgacttcgacgagaacggcctgatcaagtccctgcccaacaccccctggcagctgcgggccgccgccctggaccggaagctgacccccctggagtggtccgccgtgctgctgcacctgatcaagcaccggggctacctgtcccagcggaagaacgagggcgagaccgccgacaaggagctgggcgccctgctgaagggcgtggccaacaacgcccacgccctgcagaccggcgacttccggacccccgccgagctggccctgaacaagttcgagaaggagtccggccacatccggaaccagcggggcgactactcccacaccttctcccggaaggacctgcaggccgagctgatcctgctgttcgagaagcagaaggagttcggcaacccccacgtgtccggcggcctgaaggagggcatcgagaccctgctgatgacccagcggcccgccctgtccggcgacgccgtgcagaagatgctgggccactgcaccttcgagcccgccgagcccaaggccgccaagaacacctacaccgccgagcggttcatctggctgaccaagctgaacaacctgcggatcctggagcagggctccgagcggcccctgaccgacaccgagcgggccaccctgatggacgagccctaccggaagtccaagctgacctacgcccaggcccggaagctgctgggcctggaggacaccgccttcttcaagggcctgcggtacggcaaggacaacgccgaggcctccaccctgatggagatgaaggcctaccacgccatctcccgggccctggagaaggagggcctgaaggacaagaagtcccccctgaacctgtcctccgagctgcaggacgagatcggcaccgccttctccctgttcaagaccgacgaggacatcaccggccggctgaaggaccgggtgcagcccgagatcctggaggccctgctgaagcacatctccttcgacaagttcgtgcagatctccctgaaggccctgcggcggatcgtgcccctgatggagcagggcaagcggtacgacgaggcctgcgccgagatctacggcgaccactacggcaagaagaacaccgaggagaagatctacctgccccccatccccgccgacgagatccggaaccccgtggtgctgcgggccctgtcccaggcccggaaggtgatcaacggcgtggtgcggcggtacggctcccccgcccggatccacatcgagaccgcccgggaggtgggcaagtccttcaaggaccggaaggagatcgagaagcggcaggaggagaaccggaaggaccgggagaaggccgccgccaagttccgggagtacttccccaacttcgtgggcgagcccaagtccaaggacatcctgaagctgcggctgtacgagcagcagcacggcaagtgcctgtactccggcaaggagatcaacctggtgcggctgaacgagaagggctacgtggagatcgaccacgccctgcccttctcccggacctgggacgactccttcaacaacaaggtgctggtgctgggctccgagaaccagaacaagggcaaccagaccccctacgagtacttcaacggcaaggacaactcccgggagtggcaggagttcaaggcccgggtggagacctcccggttcccccggtccaagaagcagcggatcctgctgcagaagttcgacgaggacggcttcaaggagtgcaacctgaacgacacccggtacgtgaaccggttcctgtgccagttcgtggccgaccacatcctgctgaccggcaagggcaagcggcgggtgttcgcctccaacggccagatcaccaacctgctgcggggcttctggggcctgcggaaggtgcgggccgagaacgaccggcaccacgccctggacgccgtggtggtggcctgctccaccgtggccatgcagcagaagatcacccggttcgtgcggtacaaggagatgaacgccttcgacggcaagaccatcgacaaggagaccggcaaggtgctgcaccagaagacccacttcccccagccctgggagttcttcgcccaggaggtgatgatccgggtgttcggcaagcccgacggcaagcccgagttcgaggaggccgacacccccgagaagctgcggaccctgctggccgagaagctgtcctcccggcccgaggccgtgcacgagtacgtgacccccctgttcgtgtcccgggcccccaaccggaagatgtccggcgcccacaaggacaccctgcggtccgccaagcggttcgtgaagcacaacgagaagatctccgtgaagcgggtgtggctgaccgagatcaagctggccgacctggagaacatggtgaactacaagaacggccgggagatcgagctgtacgaggccctgaaggcccggctggaggcctacggcggcaacgccaagcaggccttcgaccccaaggacaaccccttctacaagaagggcggccagctggtgaaggccgtgcgggtggagaagacccaggagtccggcgtgctgctgaacaagaagaacgcctacaccatcgccgacaacggcgacatggtgcgggtggacgtgttctgcaaggtggacaagaagggcaagaaccagtacttcatcgtgcccatctacgcctggcaggtggccgagaacatcctgcccgacatcgactgcaagggctaccggatcgacgactcctacaccttctgcttctccctgcacaagtacgacctgatcgccttccagaaggacgagaagtccaaggtggagttcgcctactacatcaactgcgactcctccaacggccggttctacctggcctggcacgacaagggctccaaggagcagcagttccggatctccacccagaacctggtgctgatccagaagtaccaggtgaacgagctgggcaaggagatccggccctgccggctgaagaagcggccccccgtgcggtccgagtccgccacccccgagtccgtgtccggctggcggctgttcaagaagatctcctagctagcaccagcctcaagaacacccgaatggagtctctaagctacataataccaacttacactttacaaaatgttgtcccccaaaatgtagccattcgtatctgctcctaataaaaagaaagtttcttcacattctctcgagaaaaaaaaaaaatggaaaaaaaaaaaacggaaaaaaaaaaaaggtaaaaaaaaaaaatataaaaaaaaaaaacataaaaaaaaaaaacgaaaaaaaaaaaacgtaaaaaaaaaaaactcaaaaaaaaaaaagataaaaaaaaaaaacctaaaaaaaaaaaatgtaaaaaaaaaaaagggaaaaaaaaaaaacgcaaaaaaaaaaaacacaaaaaaaaaaaatgcaaaaaaaaaaaatcgaaaaaaaaaaaatctaaaaaaaaaaaacgaaaaaaaaaaaacccaaaaaaaaaaaagacaaaaaaaaaaaatagaaaaaaaaaaaagttaaaaaaaaaaaactgaaaaaaaaaaaatttaaaaaaaaaaaatctag

SEQ ID NO: 27 - RNA, 3867 nt, synthetic construct
  misc_feature 1..3867: note = Synthetic
  source 1..3867: mol_type = other RNA
gggaagctcagaataaacgctcaactttggccggatctgccaccatggacggctccggcggcggctcccccaagaagaagcggaaggtgggcggctccggcggcggcgccgccttcaagcccaaccccatcaactacatcctgggcctggacatcggcatcgcctccgtgggctgggccatggtggagatcgacgaggaggagaaccccatccggctgatcgacctgggcgtgcgggtgttcgagcgggccgaggtgcccaagaccggcgactccctggccatggcccggcggctggcccggtccgtgcggcggctgacccggcggcgggcccaccggctgctgcgggcccggcggctgctgaagcgggagggcgtgctgcaggccgccgacttcgacgagaacggcctgatcaagtccctgcccaacaccccctggcagctgcgggccgccgccctggaccggaagctgacccccctggagtggtccgccgtgctgctgcacctgatcaagcaccggggctacctgtcccagcggaagaacgagggcgagaccgccgacaaggagctgggcgccctgctgaagggcgtggccaacaacgcccacgccctgcagaccggcgacttccggacccccgccgagctggccctgaacaagttcgagaaggagtccggccacatccggaaccagcggggcgactactcccacaccttctcccggaaggacctgcaggccgagctgatcctgctgttcgagaagcagaaggagttcggcaacccccacgtgtccggcggcctgaaggagggcatcgagaccctgctgatgacccagcggcccgccctgtccggcgacgccgtgcagaagatgctgggccactgcaccttcgagcccgccgagcccaaggccgccaagaacacctacaccgccgagcggttcatctggctgaccaagctgaacaacctgcggatcctggagcagggctccgagcggcccctgaccgacaccgagcgggccaccctgatggacgagccctaccggaagtccaagctgacctacgcccaggcccggaagctgctgggcctggaggacaccgccttcttcaagggcctgcggtacggcaaggacaacgccgaggcctccaccctgatggagatgaaggcctaccacgccatctcccgggccctggagaaggagggcctgaaggacaagaagtcccccctgaacctgtcctccgagctgcaggacgagatcggcaccgccttctccctgttcaagaccgacgaggacatcaccggccggctgaaggaccgggtgcagcccgagatcctggaggccctgctgaagcacatctccttcgacaagttcgtgcagatctccctgaaggccctgcggcggatcgtgcccctgatggagcagggcaagcggtacgacgaggcctgcgccgagatctacggcgaccactacggcaagaagaacaccgaggagaagatctacctgccccccatccccgccgacgagatccggaaccccgtggtgctgcgggccctgtcccaggcccggaaggtgatcaacggcgtggtgcggcggtacggctcccccgcccggatccacatcgagaccgcccgggaggtgggcaagtccttcaaggaccggaaggagatcgagaagcggcaggaggagaaccggaaggaccgggagaaggccgccgccaagttccgggagtacttccccaacttcgtgggcgagcccaagtccaaggacatcctgaagctgcggctgtacgagcagcagcacggcaagtgcctgtactccggcaaggagatcaacctggtgcggctgaacgagaagggctacgtggagatcgaccacgccctgcccttctcccggacctgggacgactccttcaacaacaaggtgctggtgctgggctccgagaaccagaacaagggcaaccagaccccctacgagtacttcaacggcaaggacaactcccgggagtggcaggagttcaaggcccgggtggagacctcccggttcccccggtccaagaagcagcggatcctgctgcagaagttcgacgaggacggcttcaaggagtgcaacctgaacgacacccggtacgtgaaccggttcctgtgccagttcgtggccgaccacatcctgctgaccggcaagggcaagcggcgggtgttcgcctccaacggccagatcaccaacctgctgcggggcttctggggcctgcggaaggtgcgggccgagaacgaccggcaccacgccctggacgccgtggtggtggcctgctccaccgtggccatgcagcagaagatcacccggttcgtgcggtacaaggagatgaacgccttcgacggcaagaccatcgacaaggagaccggcaaggtgctgcaccagaagacccacttcccccagccctgggagttcttcgcccaggaggtgatgatccgggtgttcggcaagcccgacggcaagcccgagttcgaggaggccgacacccccgagaagctgcggaccctgctggccgagaagctgtcctcccggcccgaggccgtgcacgagtacgtgacccccctgttcgtgtcccgggcccccaaccggaagatgtccggcgcccacaaggacaccctgcggtccgccaagcggttcgtgaagcacaacgagaagatctccgtgaagcgggtgtggctgaccgagatcaagctggccgacctggagaacatggtgaactacaagaacggccgggagatcgagctgtacgaggccctgaaggcccggctggaggcctacggcggcaacgccaagcaggccttcgaccccaaggacaaccccttctacaagaagggcggccagctggtgaaggccgtgcgggtggagaagacccaggagtccggcgtgctgctgaacaagaagaacgcctacaccatcgccgacaacggcgacatggtgcgggtggacgtgttctgcaaggtggacaagaagggcaagaaccagtacttcatcgtgcccatctacgcctggcaggtggccgagaacatcctgcccgacatcgactgcaagggctaccggatcgacgactcctacaccttctgcttctccctgcacaagtacgacctgatcgccttccagaaggacgagaagtccaaggtggagttcgcctactacatcaactgcgactcctccaacggccggttctacctggcctggcacgacaagggctccaaggagcagcagttccggatctccacccagaacctggtgctgatccagaagtaccaggtgaacgagctgggcaaggagatccggccctgccggctgaagaagcggccccccgtgcggtagctagcaccagcctcaagaacacccgaatggagtctctaagctacataataccaacttacactttacaaaatgttgtcccccaaaatgtagccattcgtatctgctcctaataaaaagaaagtttcttcacattctctcgagaaaaaaaaaaaatggaaaaaaaaaaaacggaaaaaaaaaaaaggtaaaaaaaaaaaatataaaaaaaaaaaacataaaaaaaaaaaacgaaaaaaaaaaaacgtaaaaaaaaaaaactcaaaaaaaaaaagataaaaaaaaaaaacctaaaaaaaaaaaatgtaaaaaaaaaaaagggaaaaaaaaaaaacgcaaaaaaaaaaaacacaaaaaaaaaaaatgcaaaaaaaaaaaatcgaaaaaaaaaaaatctaaaaaaaaaaaacgaaaaaaaaaaaacccaaaaaaaaaaaagacaaaaaaaaaaaatagaaaaaaaaaaagttaaaaaaaaaaaactgaaaaaaaaaaaatttaaaaaaaaaaaatctag

SEQ ID NO: 28 - RNA, 4563 nt, synthetic construct
  misc_feature 1..4563: note = Synthetic
  source 1..4563: mol_type = other RNA
gggaagctcagaataaacgctcaactttggccggatctgccaccatggacggctccggcggcggctcccccaagaagaagcggaaggtggaggacaagcggcccgccgccaccaagaaggccggccaggccaagaagaagaagggcggctccggcggcggcgaggcctcccccgcctccggcccccggcacctgatggacccccacatcttcacctccaacttcaacaacggcatcggccggcacaagacctacctgtgctacgaggtggagcggctggacaacggcacctccgtgaagatggaccagcaccggggcttcctgcacaaccaggccaagaacctgctgtgcggcttctacggccggcacgccgagctgcggttcctggacctggtgccctccctgcagctggaccccgcccagatctaccgggtgacctggttcatctcctggtccccctgcttctcctggggctgcgccggcgaggtgcgggccttcctgcaggagaacacccacgtgcggctgcggatcttcgccgcccggatctacgactacgaccccctgtacaaggaggccctgcagatgctgcgggacgccggcgcccaggtgtccatcatgacctacgacgagttcaagcactgctgggacaccttcgtggaccaccagggctgccccttccagccctgggacggcctggacgagcactcccaggccctgtccggccggctgcgggccatcctgcagaaccagggcaactccggctccgagacccccggcacctccgagtccgccacccccgagtccgcagcgttcaaaccaaatcccatcaactacatcctgggcctggccatcggcatcgcctccgtgggctgggccatggtggagatcgacgaggaggagaaccccatccggctgatcgacctgggcgtgcgggtgttcgagcgggccgaggtgcccaagaccggcgactccctggccatggcccggcggctggcccggtccgtgcggcggctgacccggcggcgggcccaccggctgctgcgggcccggcggctgctgaagcgggagggcgtgctgcaggccgccgacttcgacgagaacggcctgatcaagtccctgcccaacaccccctggcagctgcgggccgccgccctggaccggaagctgacccccctggagtggtccgccgtgctgctgcacctgatcaagcaccggggctacctgtcccagcggaagaacgagggcgagaccgccgacaaggagctgggcgccctgctgaagggcgtggccaacaacgcccacgccctgcagaccggcgacttccggacccccgccgagctggccctgaacaagttcgagaaggagtccggccacatccggaaccagcggggcgactactcccacaccttctcccggaaggacctgcaggccgagctgatcctgctgttcgagaagcagaaggagttcggcaacccccacgtgtccggcggcctgaaggagggcatcgagaccctgctgatgacccagcggcccgccctgtccggcgacgccgtgcagaagatgctgggccactgcaccttcgagcccgccgagcccaaggccgccaagaacacctacaccgccgagcggttcatctggctgaccaagctgaacaacctgcggatcctggagcagggctccgagcggcccctgaccgacaccgagcgggccaccctgatggacgagccctaccggaagtccaagctgacctacgcccaggcccggaagctgctgggcctggaggacaccgccttcttcaagggcctgcggtacggcaaggacaacgccgaggcctccaccctgatggagatgaaggcctaccacgccatctcccgggccctggagaaggagggcctgaaggacaagaagtcccccctgaacctgtcctccgagctgcaggacgagatcggcaccgccttctccctgttcaagaccgacgaggacatcaccggccggctgaaggaccgggtgcagcccgagatcctggaggccctgctgaagcacatctccttcgacaagttcgtgcagatctccctgaaggccctgcggcggatcgtgcccctgatggagcagggcaagcggtacgacgaggcctgcgccgagatctacggcgaccactacggcaagaagaacaccgaggagaagatctacctgccccccatccccgccgacgagatccggaaccccgtggtgctgcgggccctgtcccaggcccggaaggtgatcaacggcgtggtgcggcggtacggctcccccgcccggatccacatcgagaccgcccgggaggtgggcaagtccttcaaggaccggaaggagatcgagaagcggcaggaggagaaccggaaggaccgggagaaggccgccgccaagttccgggagtacttccccaacttcgtgggcgagcccaagtccaaggacatcctgaagctgcggctgtacgagcagcagcacggcaagtgcctgtactccggcaaggagatcaacctggtgcggctgaacgagaagggctacgtggagatcgaccacgccctgcccttctcccggacctgggacgactccttcaacaacaaggtgctggtgctgggctccgagaaccagaacaagggcaaccagaccccctacgagtacttcaacggcaaggacaactcccgggagtggcaggagttcaaggcccgggtggagacctcccggttcccccggtccaagaagcagcggatcctgctgcagaagttcgacgaggacggcttcaaggagtgcaacctgaacgacacccggtacgtgaaccgcttcctgtgccagttcgtggccgaccacatcctgctgaccggcaagggcaagcggcgggtgttcgcctccaacggccagatcaccaacctgctgcggggcttctggggcctgcggaaggtgcgggccgagaacgaccggcaccacgccctggacgccgtggtggtggcctgctccaccgtggccatgcagcagaagatcacccggttcgtgcggtacaaggagatgaacgccttcgacggcaagaccatcgacaaggagaccggcaaggtgctgcaccagaagacccacttcccccagccctgggagttcttcgcccaggaggtgatgatccgggtgttcggcaagcccgacggcaagcccgagttcgaggaggccgacacccccgagaagctgcggaccctgctggccgagaagctgtcctcccggcccgaggccgtgcacgagtacgtgacccccctgttcgtgtcccgggcccccaaccggaagatgtccggcgcccacaaggacaccctgcggtccgccaagcggttcgtgaagcacaacgagaagatctccgtgaagcgggtgtggctgaccgagatcaagctggccgacctggagaacatggtgaactacaagaacggccgggagatcgagctgtacgaggccctgaaggcccggctggaggcctacggcggcaacgccaagcaggccttcgaccccaaggacaaccccttctacaagaagggcggccagctggtgaaggccgtgcgggtggagaagacccaggagtccggcgtgctgctgaacaagaagaacgcctacaccatcgccgacaacggcgacatggtgcgggtggacgtgttctgcaaggtggacaagaagggcaagaaccagtacttcatcgtgcccatctacgcctggcaggtggccgagaacatcctgcccgacatcgactgcaagggctaccggatcgacgactcctacaccttctgcttctccctgcacaagtacgacctgatcgccttccagaaggacgagaagtccaaggtggagttcgcctactacatcaactgcgactcctccaacggccggttctacctggcctggcacgacaagggctccaaggagcagcagttccggatctccacccagaacctggtgctgatccagaagtaccaggtgaacgagctgggcaaggagatccggccctgccggctgaagaagcggccccccgtgcggtagtgactagcaccagcctcaagaacacccgaatggagtctctaagctacataataccaacttacactttacaaaatgttgtcccccaaaatgtagccattcgtatctgctcctaataaaaagaaagtttcttcacattctctcgagaaaaaaaaaaaatggaaaaaaaaaaaacggaaaaaaaaaaaggtaaaaaaaaaaaatataaaaaaaaaaacataaaaaaaaaaaacgaaaaaaaaaaaacgtaaaaaaaaaaaactcaaaaaaaaaaagataaaaaaaaaaaacctaaaaaaaaaaaatgtaaaaaaaaaaaagggaaaaaaaaaaacgcaaaaaaaaaaaacacaaaaaaaaaaaatgcaaaaaaaaaaaatcgaaaaaaaaaaaatctaaaaaaaaaaaacgaaaaaaaaaaaacccaaaaaaaaaaaagacaaaaaaaaaaaatagaaaaaaaaaaagttaaaaaaaaaaaactgaaaaaaaaaaaatttaaaaaaaaaaaatctag

SEQ ID NO: 29 - DNA, 3318 bp, synthetic construct
  misc_feature 1..3318: note = Synthetic
  source 1..3318: mol_type = other DNA
atgaccggtgccgccttcaagcccaaccccatcaactacatcctgggcctggacatcggcatcgcctccgtgggctgggccatggtggagatcgacgaggaggagaaccccatccggctgatcgacctgggcgtgcgggtgttcgagcgggccgaggtgcccaagaccggcgactccctggccatggcccggcggctggcccggtccgtgcggcggctgacccggcggcgggcccaccggctgctgcgggcccggcggctgctgaagcgggagggcgtgctgcaggccgccgacttcgacgagaacggcctgatcaagtccctgcccaacaccccctggcagctgcgggccgccgccctggaccggaagctgacccccctggagtggtccgccgtgctgctgcacctgatcaagcaccggggctacctgtcccagcggaagaacgagggcgagaccgccgacaaggagctgggcgccctgctgaagggcgtggccaacaacgcccacgccctgcagaccggcgacttccggacccccgccgagctggccctgaacaagttcgagaaggagtccggccacatccggaaccagcggggcgactactcccacaccttctcccggaaggacctgcaggccgagctgatcctgctgttcgagaagcagaaggagttcggcaacccccacgtgtccggcggcctgaaggagggcatcgagaccctgctgatgacccagcggcccgccctgtccggcgacgccgtgcagaagatgctgggccactgcaccttcgagcccgccgagcccaaggccgccaagaacacctacaccgccgagcggttcatctggctgaccaagctgaacaacctgcggatcctggagcagggctccgagcggcccctgaccgacaccgagcgggccaccctgatggacgagccctaccggaagtccaagctgacctacgcccaggcccggaagctgctgggcctggaggacaccgccttcttcaagggcctgcggtacggcaaggacaacgccgaggcctccaccctgatggagatgaaggcctaccacgccatctcccgggccctggagaaggagggcctgaaggacaagaagtcccccctgaacctgtcctccgagctgcaggacgagatcggcaccgccttctccctgttcaagaccgacgaggacatcaccggccggctgaaggaccgggtgcagcccgagatcctggaggccctgctgaagcacatctccttcgacaagttcgtgcagatctccctgaaggccctgcggcggatcgtgcccctgatggagcagggcaagcggtacgacgaggcctgcgccgagatctacggcgaccactacggcaagaagaacaccgaggagaagatctacctgccccccatccccgccgacgagatccggaaccccgtggtgctgcgggccctgtcccaggcccggaaggtgatcaacggcgtggtgcggcggtacggctcccccgcccggatccacatcgagaccgcccgggaggtgggcaagtccttcaaggaccggaaggagatcgagaagcggcaggaggagaaccggaaggaccgggagaaggccgccgccaagttccgggagtacttccccaacttcgtgggcgagcccaagtccaaggacatcctgaagctgcggctgtacgagcagcagcacggcaagtgcctgtactccggcaaggagatcaacctggtgcggctgaacgagaagggctacgtggagatcgaccacgccctgcccttctcccggacctgggacgactccttcaacaacaaggtgctggtgctgggctccgagaaccagaacaagggcaaccagaccccctacgagtacttcaacggcaaggacaactcccgggagtggcaggagttcaaggcccgggtggagacctcccggttcccccggtccaagaagcagcggatcctgctgcagaagttcgacgaggacggcttcaaggagtgcaacctgaacgacacccggtacgtgaaccgcttcctgtgccagttcgtggccgaccacatcctgctgaccggcaagggcaagcggcgggtgttcgcctccaacggccagatcaccaacctgctgcggggcttctggggcctgcggaaggtgcgggccgagaacgaccggcaccacgccctggacgccgtggtggtggcctgctccaccgtggccatgcagcagaagatcacccggttcgtgcggtacaaggagatgaacgccttcgacggcaagaccatcgacaaggagaccggcaaggtgctgcaccagaagacccacttcccccagccctgggagttcttcgcccaggaggtgatgatccgggtgttcggcaagcccgacggcaagcccgagttcgaggaggccgacacccccgagaagctgcggaccctgctggccgagaagctgtcctcccggcccgaggccgtgcacgagtacgtgacccccctgttcgtgtcccgggcccccaaccggaagatgtccggcgcccacaaggacaccctgcggtccgccaagcggttcgtgaagcacaacgagaagatctccgtgaagcgggtgtggctgaccgagatcaagctggccgacctggagaacatggtgaactacaagaacggccgggagatcgagctgtacgaggccctgaaggcccggctggaggcctacggcggcaacgccaagcaggccttcgaccccaaggacaaccccttctacaagaagggcggccagctggtgaaggccgtgcgggtggagaagacccaggagtccggcgtgctgctgaacaagaagaacgcctacaccatcgccgacaacggcgacatggtgcgggtggacgtgttctgcaaggtggacaagaagggcaagaaccagtacttcatcgtgcccatctacgcctggcaggtggccgagaacatcctgcccgacatcgactgcaagggctaccggatcgacgactcctacaccttctgcttctccctgcacaagtacgacctgatcgccttccagaaggacgagaagtccaaggtggagttcgcctactacatcaactgcgactcctccaacggccggttctacctggcctggcacgacaagggctccaaggagcagcagttccggatctccacccagaacctggtgctgatccagaagtaccaggtgaacgagctgggcaaggagatccggccctgccggctgaagaagcggccccccgtgcggtccggaaagcggaccgccgacggctccgagttcgagtcccccaagaagaagcggaaggtggagtag

SEQ ID NO: 30 - DNA, 4782 bp, synthetic construct
  misc_feature 1..4782: note = Synthetic
  source 1..4782: mol_type = other DNA
atggaggcctcccccgcctccggcccccggcacctgatggacccccacatcttcacctccaacttcaacaacggcatcggccggcacaagacctacctgtgctacgaggtggagcggctggacaacggcacctccgtgaagatggaccagcaccggggcttcctgcacaaccaggccaagaacctgctgtgcggcttctacggccggcacgccgagctgcggttcctggacctggtgccctccctgcagctggaccccgcccagatctaccgggtgacctggttcatctcctggtccccctgcttctcctggggctgcgccggcgaggtgcgggccttcctgcaggagaacacccacgtgcggctgcggatcttcgccgcccggatctacgactacgaccccctgtacaaggaggccctgcagatgctgcgggacgccggcgcccaggtgtccatcatgacctacgacgagttcaagcactgctgggacaccttcgtggaccaccagggctgccccttccagccctgggacggcctggacgagcactcccaggccctgtccggccggctgcgggccatcctgcagaaccagggcaactccggctccgagacccccggcacctccgagtccgccacccccgagtccgacaagaagtactccatcggcctggccatcggcaccaactccgtgggctgggccgtgatcaccgacgagtacaaggtgccctccaagaagttcaaggtgctgggcaacaccgaccggcactccatcaagaagaacctgatcggcgccctgctgttcgactccggcgagaccgccgaggccacccggctgaagcggaccgcccggcggcggtacacccggcggaagaaccggatctgctacctgcaggagatcttctccaacgagatggccaaggtggacgactccttcttccaccggctggaggagtccttcctggtggaggaggacaagaagcacgagcggcaccccatcttcggcaacatcgtggacgaggtggcctaccacgagaagtaccccaccatctaccacctgcggaagaagctggtggactccaccgacaaggccgacctgcggctgatctacctggccctggcccacatgatcaagttccggggccacttcctgatcgagggcgacctgaaccccgacaactccgacgtggacaagctgttcatccagctggtgcagacctacaaccagctgttcgaggagaaccccatcaacgcctccggcgtggacgccaaggccatcctgtccgcccggctgtccaagtcccggcggctggagaacctgatcgcccagctgcccggcgagaagaagaacggcctgttcggcaacctgatcgccctgtccctgggcctgacccccaacttcaagtccaacttcgacctggccgaggacgccaagctgcagctgtccaaggacacctacgacgacgacctggacaacctgctggcccagatcggcgaccagtacgccgacctgttcctggccgccaagaacctgtccgacgccatcctgctgtccgacatcctgcgggtgaacaccgagatcaccaaggcccccctgtccgcctccatgatcaagcggtacgacgagcaccaccaggacctgaccctgctgaaggccctggtgcggcagcagctgcccgagaagtacaaggagatcttcttcgaccagtccaagaacggctacgccggctacatcgacggcggcgcctcccaggaggagttctacaagttcatcaagcccatcctggagaagatggacggcaccgaggagctgctggtgaagctgaaccgggaggacctgctgcggaagcagcggaccttcgacaacggctccatcccccaccagatccacctgggcgagctgcacgccatcctgcggcggcaggaggacttctaccccttcctgaaggacaaccgggagaagatcgagaagatcctgaccttccggatcccctactacgtgggccccctggcccggggcaactcccggttcgcctggatgacccggaagtccgaggagaccatcaccccctggaacttcgaggaggtggtggacaagggcgcctccgcccagtccttcatcgagcggatgaccaacttcgacaagaacctgcccaacgagaaggtgctgcccaagcactccctgctgtacgagtacttcaccgtgtacaacgagctgaccaaggtgaagtacgtgaccgagggcatgcggaagcccgccttcctgtccggcgagcagaagaaggccatcgtggacctgctgttcaagaccaaccggaaggtgaccgtgaagcagctgaaggaggactacttcaagaagatcgagtgcttcgactccgtggagatctccggcgtggaggaccggttcaacgcctccctgggcacctaccacgacctgctgaagatcatcaaggacaaggacttcctggacaacgaggagaacgaggacatcctggaggacatcgtgctgaccctgaccctgttcgaggaccgggagatgatcgaggagcggctgaagacctacgcccacctgttcgacgacaaggtgatgaagcagctgaagcggcggcggtacaccggctggggccggctgtcccggaagctgatcaacggcatccgggacaagcagtccggcaagaccatcctggacttcctgaagtccgacggcttcgccaaccggaacttcatgcagctgatccacgacgactccctgaccttcaaggaggacatccagaaggcccaggtgtccggccagggcgactccctgcacgagcacatcgccaacctggccggctcccccgccatcaagaagggcatcctgcagaccgtgaaggtggtggacgagctggtgaaggtgatgggccggcacaagcccgagaacatcgtgatcgagatggcccgggagaaccagaccacccagaagggccagaagaactcccgggagcggatgaagcggatcgaggagggcatcaaggagctgggctcccagatcctgaaggagcaccccgtggagaacacccagctgcagaacgagaagctgtacctgtactacctgcagaacggccgggacatgtacgtggaccaggagctggacatcaaccggctgtccgactacgacgtggaccacatcgtgccccagtccttcctgaaggacgactccatcgacaacaaggtgctgacccggtccgacaagaaccggggcaagtccgacaacgtgccctccgaggaggtggtgaagaagatgaagaactactggcggcagctgctgaacgccaagctgatcacccagcggaagttcgacaacctgaccaaggccgagcggggcggcctgtccgagctggacaaggccggcttcatcaagcggcagctggtggagacccggcagatcaccaagcacgtggcccagatcctggactcccggatgaacaccaagtacgacgagaacgacaagctgatccgggaggtgaaggtgatcaccctgaagtccaagctggtgtccgacttccggaaggacttccagttctacaaggtgcgggagatcaacaactaccaccacgcccacgacgcctacctgaacgccgtggtgggcaccgccctgatcaagaagtaccccaagctggagtccgagttcgtgtacggcgactacaaggtgtacgacgtgcggaagatgatcgccaagtccgagcaggagatcggcaaggccaccgccaagtacttcttctactccaacatcatgaacttcttcaagaccgagatcaccctggccaacggcgagatccggaagcggcccctgatcgagaccaacggcgagaccggcgagatcgtgtgggacaagggccgggacttcgccaccgtgcggaaggtgctgtccatgccccaggtgaacatcgtgaagaagaccgaggtgcagaccggcggcttctccaaggagtccatcctgcccaagcggaactccgacaagctgatcgcccggaagaaggactgggaccccaagaagtacggcggcttcgactcccccaccgtggcctactccgtgctggtggtggccaaggtggagaagggcaagtccaagaagctgaagtccgtgaaggagctgctgggcatcaccatcatggagcggtcctccttcgagaagaaccccatcgacttcctggaggccaagggctacaaggaggtgaagaaggacctgatcatcaagctgcccaagtactccctgttcgagctggagaacggccggaagcggatgctggcctccgccggcgagctgcagaagggcaacgagctggccctgccctccaagtacgtgaacttcctgtacctggcctcccactacgagaagctgaagggctcccccgaggacaacgagcagaagcagctgttcgtggagcagcacaagcactacctggacgagatcatcgagcagatctccgagttctccaagcgggtgatcctggccgacgccaacctggacaaggtgctgtccgcctacaacaagcaccgggacaagcccatccgggagcaggccgagaacatcatccacctgttcaccctgaccaacctgggcgcccccgccgccttcaagtacttcgacaccaccatcgaccggaagcggtacacctccaccaaggaggtgctggacgccaccctgatccaccagtccatcaccggcctgtacgagacccggatcgacctgtcccagctgggcggcgacggcggcggctcccccaagaagaagcggaaggtgtga

SEQ ID NO: 31 - DNA, 327 bp, synthetic construct
  misc_feature 1..327: note = Synthetic
  source 1..327: mol_type = other DNA
atgaccaacctgtccgacatcatcgagaaggagaccggcaagcagctggtgatccaggagtccatcctgatgctgcccgaggaggtggaggaggtgatcggcaacaagcccgagtccgacatcctggtgcacaccgcctacgacgagtccaccgacgagaacgtgatgctgctgacctccgacgcccccgagtacaagccctgggccctggtgatccaggactccaacggcgagaacaagatcaagatgctgtccggcggctccaagcggaccgccgacggctccgagttcgagtcccccaagaagaagcggaaggtggagtgatag

SEQ ID NO: 32 - DNA, 3294 bp, synthetic construct
  misc_feature 1..3294: note = Synthetic
  source 1..3294: mol_type = other DNA
atggccgccttcaagcccaaccccatcaactacatcctgggcctggacatcggcatcgcctccgtgggctgggccatggtggagatcgacgaggaggagaaccccatccggctgatcgacctgggcgtgcgggtgttcgagcgggccgaggtgcccaagaccggcgactccctggccatggcccggcggctggcccggtccgtgcggcggctgacccggcggcgggcccaccggctgctgcgggcccggcggctgctgaagcgggagggcgtgctgcaggccgccgacttcgacgagaacggcctgatcaagtccctgcccaacaccccctggcagctgcgggccgccgccctggaccggaagctgacccccctggagtggtccgccgtgctgctgcacctgatcaagcaccggggctacctgtcccagcggaagaacgagggcgagaccgccgacaaggagctgggcgccctgctgaagggcgtggccaacaacgcccacgccctgcagaccggcgacttccggacccccgccgagctggccctgaacaagttcgagaaggagtccggccacatccggaaccagcggggcgactactcccacaccttctcccggaaggacctgcaggccgagctgatcctgctgttcgagaagcagaaggagttcggcaacccccacgtgtccggcggcctgaaggagggcatcgagaccctgctgatgacccagcggcccgccctgtccggcgacgccgtgcagaagatgctgggccactgcaccttcgagcccgccgagcccaaggccgccaagaacacctacaccgccgagcggttcatctggctgaccaagctgaacaacctgcggatcctggagcagggctccgagcggcccctgaccgacaccgagcgggccaccctgatggacgagccctaccggaagtccaagctgacctacgcccaggcccggaagctgctgggcctggaggacaccgccttcttcaagggcctgcggtacggcaaggacaacgccgaggcctccaccctgatggagatgaaggcctaccacgccatctcccgggccctggagaaggagggcctgaaggacaagaagtcccccctgaacctgtcctccgagctgcaggacgagatcggcaccgccttctccctgttcaagaccgacgaggacatcaccggccggctgaaggaccgggtgcagcccgagatcctggaggccctgctgaagcacatctccttcgacaagttcgtgcagatctccctgaaggccctgcggcggatcgtgcccctgatggagcagggcaagcggtacgacgaggcctgcgccgagatctacggcgaccactacggcaagaagaacaccgaggagaagatctacctgccccccatccccgccgacgagatccggaaccccgtggtgctgcgggccctgtcccaggcccggaaggtgatcaacggcgtggtgcggcggtacggctcccccgcccggatccacatcgagaccgcccgggaggtgggcaagtccttcaaggaccggaaggagatcgagaagcggcaggaggagaaccggaaggaccgggagaaggccgccgccaagttccgggagtacttccccaacttcgtgggcgagcccaagtccaaggacatcctgaagctgcggctgtacgagcagcagcacggcaagtgcctgtactccggcaaggagatcaacctggtgcggctgaacgagaagggctacgtggagatcgaccacgccctgcccttctcccggacctgggacgactccttcaacaacaaggtgctggtgctgggctccgagaaccagaacaagggcaaccagaccccctacgagtacttcaacggcaaggacaactcccgggagtggcaggagttcaaggcccgggtggagacctcccggttcccccggtccaagaagcagcggatcctgctgcagaagttcgacgaggacggcttcaaggagtgcaacctgaacgacacccggtacgtgaaccggttcctgtgccagttcgtggccgaccacatcctgctgaccggcaagggcaagcggcgggtgttcgcctccaacggccagatcaccaacctgctgcggggcttctggggcctgcggaaggtgcgggccgagaacgaccggcaccacgccctggacgccgtggtggtggcctgctccaccgtggccatgcagcagaagatcacccggttcgtgcggtacaaggagatgaacgccttcgacggcaagaccatcgacaaggagaccggcaaggtgctgcaccagaagacccacttcccccagccctgggagttcttcgcccaggaggtgatgatccgggtgttcggcaagcccgacggcaagcccgagttcgaggaggccgacacccccgagaagctgcggaccctgctggccgagaagctgtcctcccggcccgaggccgtgcacgagtacgtgacccccctgttcgtgtcccgggcccccaaccggaagatgtccggcgcccacaaggacaccctgcggtccgccaagcggttcgtgaagcacaacgagaagatctccgtgaagcgggtgtggctgaccgagatcaagctggccgacctggagaacatggtgaactacaagaacggccgggagatcgagctgtacgaggccctgaaggcccggctggaggcctacggcggcaacgccaagcaggccttcgaccccaaggacaaccccttctacaagaagggcggccagctggtgaaggccgtgcgggtggagaagacccaggagtccggcgtgctgctgaacaagaagaacgcctacaccatcgccgacaacggcgacatggtgcgggtggacgtgttctgcaaggtggacaagtccggcggcggctcccccaagaagaagcggaaggtgtccggcggctccggcaagaaccagtacttcatcgtgcccatctacgcctggcaggtggccgagaacatcctgcccgacatcgactgcaagggctaccggatcgacgactcctacaccttctgcttctccctgcacaagtacgacctgatcgccttccagaaggacgagaagtccaaggtggagttcgcctactacatcaactgcgactcctccaacggccggttctacctggcctggcacgacaagggctccaaggagcagcagttccggatctccacccagaacctggtgctgatccagaagtaccaggtgaacgagctgggcaaggagatccggccctgccggctgaagaagcggccccccgtgcggtag

SEQ ID NO: 33 - DNA, 3333 bp, synthetic construct
  misc_feature 1..3333: note = Synthetic
  source 1..3333: mol_type = other DNA
atggtgcccaagaagaagcggaaggtggccgccttcaagcccaaccccatcaactacatcctgggcctggacatcggcatcgcctccgtgggctgggccatggtggagatcgacgaggaggagaaccccatccggctgatcgacctgggcgtgcgggtgttcgagcgggccgaggtgcccaagaccggcgactccctggccatggcccggcggctggcccggtccgtgcggcggctgacccggcggcgggcccaccggctgctgcgggcccggcggctgctgaagcgggagggcgtgctgcaggccgccgacttcgacgagaacggcctgatcaagtccctgcccaacaccccctggcagctgcgggccgccgccctggaccggaagctgacccccctggagtggtccgccgtgctgctgcacctgatcaagcaccggggctacctgtcccagcggaagaacgagggcgagaccgccgacaaggagctgggcgccctgctgaagggcgtggccaacaacgcccacgccctgcagaccggcgacttccggacccccgccgagctggccctgaacaagttcgagaaggagtccggccacatccggaaccagcggggcgactactcccacaccttctcccggaaggacctgcaggccgagctgatcctgctgttcgagaagcagaaggagttcggcaacccccacgtgtccggcggcctgaaggagggcatcgagaccctgctgatgacccagcggcccgccctgtccggcgacgccgtgcagaagatgctgggccactgcaccttcgagcccgccgagcccaaggccgccaagaacacctacaccgccgagcggttcatctggctgaccaagctgaacaacctgcggatcctggagcagggctccgagcggcccctgaccgacaccgagcgggccaccctgatggacgagccctaccggaagtccaagctgacctacgcccaggcccggaagctgctgggcctggaggacaccgccttcttcaagggcctgcggtacggcaaggacaacgccgaggcctccaccctgatggagatgaaggcctaccacgccatctcccgggccctggagaaggagggcctgaaggacaagaagtcccccctgaacctgtcctccgagctgcaggacgagatcggcaccgccttctccctgttcaagaccgacgaggacatcaccggccggctgaaggaccgggtgcagcccgagatcctggaggccctgctgaagcacatctccttcgacaagttcgtgcagatctccctgaaggccctgcggcggatcgtgcccctgatggagcagggcaagcggtacgacgaggcctgcgccgagatctacggcgaccactacggcaagaagaacaccgaggagaagatctacctgccccccatccccgccgacgagatccggaaccccgtggtgctgcgggccctgtcccaggcccggaaggtgatcaacggcgtggtgcggcggtacggctcccccgcccggatccacatcgagaccgcccgggaggtgggcaagtccttcaaggaccggaaggagatcgagaagcggcaggaggagaaccggaaggaccgggagaaggccgccgccaagttccgggagtacttccccaacttcgtgggcgagcccaagtccaaggacatcctgaagctgcggctgtacgagcagcagcacggcaagtgcctgtactccggcaaggagatcaacctggtgcggctgaacgagaagggctacgtggagatcgaccacgccctgcccttctcccggacctgggacgactccttcaacaacaaggtgctggtgctgggctccgagaaccagaacaagggcaaccagaccccctacgagtacttcaacggcaaggacaactcccgggagtggcaggagttcaaggcccgggtggagacctcccggttcccccggtccaagaagcagcggatcctgctgcagaagttcgacgaggacggcttcaaggagtgcaacctgaacgacacccggtacgtgaaccggttcctgtgccagttcgtggccgaccacatcctgctgaccggcaagggcaagcggcgggtgttcgcctccaacggccagatcaccaacctgctgcggggcttctggggcctgcggaaggtgcgggccgagaacgaccggcaccacgccctggacgccgtggtggtggcctgctccaccgtggccatgcagcagaagatcacccggttcgtgcggtacaaggagatgaacgccttcgacggcaagaccatcgacaaggagaccggcaaggtgctgcaccagaagacccacttcccccagccctgggagttcttcgcccaggaggtgatgatccgggtgttcggcaagcccgacggcaagcccgagttcgaggaggccgacacccccgagaagctgcggaccctgctggccgagaagctgtcctcccggcccgaggccgtgcacgagtacgtgacccccctgttcgtgtcccgggcccccaaccggaagatgtccggcgcccacaaggacaccctgcggtccgccaagcggttcgtgaagcacaacgagaagatctccgtgaagcgggtgtggctgaccgagatcaagctggccgacctggagaacatggtgaactacaagaacggccgggagatcgagctgtacgaggccctgaaggcccggctggaggcctacggcggcaacgccaagcaggccttcgaccccaaggacaaccccttctacaagaagggcggccagctggtgaaggccgtgcgggtggagaagacccaggagtccggcgtgctgctgaacaagaagaacgcctacaccatcgccgacaacggcgacatggtgcgggtggacgtgttctgcaaggtggacaagaagggcaagaaccagtacttcatcgtgcccatctacgcctggcaggtggccgagaacatcctgcccgacatcgactgcaagggctaccggatcgacgactcctacaccttctgcttctccctgcacaagtacgacctgatcgccttccagaaggacgagaagtccaaggtggagttcgcctactacatcaactgcgactcctccaacggccggttctacctggcctggcacgacaagggctccaaggagcagcagttccggatctccacccagaacctggtgctgatccagaagtaccaggtgaacgagctgggcaaggagatccggccctgccggctgaagaagcggccccccgtgcggtacccctacgacgtgcccgactacgccgccgcccccgccgccaagaagaagaagctggactag

SEQ ID NO: 34 - DNA, 3246 bp, synthetic construct
  misc_feature 1..3246: note = Synthetic
  source 1..3246: mol_type = other DNA
atggccgccttcaagcccaaccccatcaactacatcctgggcctggacatcggcatcgcctccgtgggctgggccatggtggagatcgacgaggaggagaaccccatccggctgatcgacctgggcgtgcgggtgttcgagcgggccgaggtgcccaagaccggcgactccctggccatggcccggcggctggcccggtccgtgcggcggctgacccggcggcgggcccaccggctgctgcgggcccggcggctgctgaagcgggagggcgtgctgcaggccgccgacttcgacgagaacggcctgatcaagtccctgcccaacaccccctggcagctgcgggccgccgccctggaccggaagctgacccccctggagtggtccgccgtgctgctgcacctgatcaagcaccggggctacctgtcccagcggaagaacgagggcgagaccgccgacaaggagctgggcgccctgctgaagggcgtggccaacaacgcccacgccctgcagaccggcgacttccggacccccgccgagctggccctgaacaagttcgagaaggagtccggccacatccggaaccagcggggcgactactcccacaccttctcccggaaggacctgcaggccgagctgatcctgctgttcgagaagcagaaggagttcggcaacccccacgtgtccggcggcctgaaggagggcatcgagaccctgctgatgacccagcggcccgccctgtccggcgacgccgtgcagaagatgctgggccactgcaccttcgagcccgccgagcccaaggccgccaagaacacctacaccgccgagcggttcatctggctgaccaagctgaacaacctgcggatcctggagcagggctccgagcggcccctgaccgacaccgagcgggccaccctgatggacgagccctaccggaagtccaagctgacctacgcccaggcccggaagctgctgggcctggaggacaccgccttcttcaagggcctgcggtacggcaaggacaacgccgaggcctccaccctgatggagatgaaggcctaccacgccatctcccgggccctggagaaggagggcctgaaggacaagaagtcccccctgaacctgtcctccgagctgcaggacgagatcggcaccgccttctccctgttcaagaccgacgaggacatcaccggccggctgaaggaccgggtgcagcccgagatcctggaggccctgctgaagcacatctccttcgacaagttcgtgcagatctccctgaaggccctgcggcggatcgtgcccctgatggagcagggcaagcggtacgacgaggcctgcgccgagatctacggcgaccactacggcaagaagaacaccgaggagaagatctacctgccccccatccccgccgacgagatccggaaccccgtggtgctgcgggccctgtcccaggcccggaaggtgatcaacggcgtggtgcggcggtacggctcccccgcccggatccacatcgagaccgcccgggaggtgggcaagtccttcaaggaccggaaggagatcgagaagcggcaggaggagaaccggaaggaccgggagaaggccgccgccaagttccgggagtacttccccaacttcgtgggcgagcccaagtccaaggacatcctgaagctgcggctgtacgagcagcagcacggcaagtgcctgtactccggcaaggagatcaacctggtgcggctgaacgagaagggctacgtggagatcgaccacgccctgcccttctcccggacctgggacgactccttcaacaacaaggtgctggtgctgggctccgagaaccagaacaagggcaaccagaccccctacgagtacttcaacggcaaggacaactcccgggagtggcaggagttcaaggcccgggtggagacctcccggttcccccggtccaagaagcagcggatcctgctgcagaagttcgacgaggacggcttcaaggagtgcaacctgaacgacacccggtacgtgaaccggttcctgtgccagttcgtggccgaccacatcctgctgaccggcaagggcaagcggcgggtgttcgcctccaacggccagatcaccaacctgctgcggggcttctggggcctgcggaaggtgcgggccgagaacgaccggcaccacgccctggacgccgtggtggtggcctgctccaccgtggccatgcagcagaagatcacccggttcgtgcggtacaaggagatgaacgccttcgacggcaagaccatcgacaaggagaccggcaaggtgctgcaccagaagacccacttcccccagccctgggagttcttcgcccaggaggtgatgatccgggtgttcggcaagcccgacggcaagcccgagttcgaggaggccgacacccccgagaagctgcggaccctgctggccgagaagctgtcctcccggcccgaggccgtgcacgagtacgtgacccccctgttcgtgtcccgggcccccaaccggaagatgtccggcgcccacaaggacaccctgcggtccgccaagcggttcgtgaagcacaacgagaagatctccgtgaagcgggtgtggctgaccgagatcaagctggccgacctggagaacatggtgaactacaagaacggccgggagatcgagctgtacgaggccctgaaggcccggctggaggcctacggcggcaacgccaagcaggccttcgaccccaaggacaaccccttctacaagaagggcggccagctggtgaaggccgtgcgggtggagaagacccaggagtccggcgtgctgctgaacaagaagaacgcctacaccatcgccgacaacggcgacatggtgcgggtggacgtgttctgcaaggtggacaagaagggcaagaaccagtacttcatcgtgcccatctacgcctggcaggtggccgagaacatcctgcccgacatcgactgcaagggctaccggatcgacgactcctacaccttctgcttctccctgcacaagtacgacctgatcgccttccagaaggacgagaagtccaaggtggagttcgcctactacatcaactgcgactcctccaacggccggttctacctggcctggcacgacaagggctccaaggagcagcagttccggatctccacccagaacctggtgctgatccagaagtaccaggtgaacgagctgggcaaggagatccggccctgccggctgaagaagcggccccccgtgcgg

SEQ ID NO: 35 - DNA, 3246 bp, synthetic construct; identical to SEQ ID NO: 34
  misc_feature 1..3246: note = Synthetic
  source 1..3246: mol_type = other DNA

SEQ ID NO: 36 - DNA, 3309 bp, synthetic construct
  misc_feature 1..3309: note = Synthetic
  source 1..3309: mol_type = other DNA
atggacggctccggcggcggctcccccaagaagaagcggaaggtgggcggctccggcggcggcgccgccttcaagcccaaccccatcaactacatcctgggcctggacatcggcatcgcctccgtgggctgggccatggtggagatcgacgaggaggagaaccccatccggctgatcgacctgggcgtgcgggtgttcgagcgggccgaggtgcccaagaccggcgactccctggccatggcccggcggctggcccggtccgtgcggcggctgacccggcggcgggcccaccggctgctgcgggcccggcggctgctgaagcgggagggcgtgctgcaggccgccgacttcgacgagaacggcctgatcaagtccctgcccaacaccccctggcagctgcgggccgccgccctggaccggaagctgacccccctggagtggtccgccgtgctgctgcacctgatcaagcaccggggctacctgtcccagcggaagaacgagggcgagaccgccgacaaggagctgggcgccctgctgaagggcgtggccaacaacgcccacgccctgcagaccggcgacttccggacccccgccgagctggccctgaacaagttcgagaaggagtccggccacatccggaaccagcggggcgactactcccacaccttctcccggaaggacctgcaggccgagctgatcctgctgttcgagaagcagaaggagttcggcaacccccacgtgtccggcggcctgaaggagggcatcgagaccctgctgatgacccagcggcccgccctgtccggcgacgccgtgcagaagatgctgggccactgcaccttcgagcccgccgagcccaaggccgccaagaacacctacaccgccgagcggttcatctggctgaccaagctgaacaacctgcggatcctggagcagggctccgagcggcccctgaccgacaccgagcgggccaccctgatggacgagccctaccggaagtccaagctgacctacgcccaggcccggaagctgctgggcctggaggacaccgccttcttcaagggcctgcggtacggcaaggacaacgccgaggcctccaccctgatggagatgaaggcctaccacgccatctcccgggccctggagaaggagggcctgaaggacaagaagtcccccctgaacctgtcctccgagctgcaggacgagatcggcaccgccttctccctgttcaagaccgacgaggacatcaccggccggctgaaggaccgggtgcagcccgagatcctggaggccctgctgaagcacatctccttcgacaagttcgtgcagatctccctgaaggccctgcggcggatcgtgcccctgatggagcagggcaagcggtacgacgaggcctgcgccgagatctacggcgaccactacggcaagaagaacaccgaggagaagatctacctgccccccatccccgccgacgagatccggaaccccgtggtgctgcgggccctgtcccaggcccggaaggtgatcaacggcgtggtgcggcggtacggctcccccgcccggatccacatcgagaccgcccgggaggtgggcaagtccttcaaggaccggaaggagatcgagaagcggcaggaggagaaccggaaggaccgggagaaggccgccgccaagttccgggagtacttccccaacttcgtgggcgagcccaagtccaaggacatcctgaagctgcggctgtacgagcagcagcacggcaagtgcctgtactccggcaaggagatcaacctggtgcggctgaacgagaagggctacgtggagatcgaccacgccctgcccttctcccggacctgggacgactccttcaacaacaaggtgctggtgctgggctccgagaaccagaacaagggcaaccagaccccctacgagtacttcaacggcaaggacaactcccgggagtggcaggagttcaaggcccgggtggagacctcccggttcccccggtccaagaagcagcggatcctgctgcagaagttcgacgaggacggcttcaaggagtgcaacctgaacgacacccggtacgtgaaccggttcctgtgccagttcgtggccgaccacatcctgctgaccggcaagggcaagcggcgggtgttcgcctccaacggccagatcaccaacctgctgcggggcttctggggcctgcggaaggtgcgggccgagaacgaccggcaccacgccctggacgccgtggtggtggcctgctccaccgtggccatgcagcagaagatcacccggttcgtgcggtacaaggagatgaacgccttcgacggcaagaccatcgacaaggagaccggcaaggtgctgcaccagaagacccacttcccccagccctgggagttcttcgcccaggaggtgatgatccgggtgttcggcaagcccgacggcaagcccgagttcgaggaggccgacacccccgagaagctgcggaccctgctggccgagaagctgtcctcccggcccgaggccgtgcacgagtacgtgacccccctgttcgtgtcccgggcccccaaccggaagatgtccggcgcccacaaggacaccctgcggtccgccaagcggttcgtgaagcacaacgagaagatctccgtgaagcgggtgtggctgaccgagatcaagctggccgacctggagaacatggtgaactacaagaacggccgggagatcgagctgtacgaggccctgaaggcccggctggaggcctacggcggcaacgccaagcaggccttcgaccccaaggacaaccccttctacaagaagggcggccagctggtgaaggccgtgcgggtggagaagacccaggagtccggcgtgctgctgaacaagaagaacgcctacaccatcgccgacaacggcgacatggtgcgggtggacgtgttctgcaaggtggacaagaagggcaagaaccagtacttcatcgtgcccatctacgcctggcaggtggccgagaacatcctgcccgacatcgactgcaagggctaccggatcgacgactcctacaccttctgcttctccctgcacaagtacgacctgatcgccttccagaaggacgagaagtccaaggtggagttcgcctactacatcaactgcgactcctccaacggccggttctacctggcctggcacgacaagggctccaaggagcagcagttccggatctccacccagaacctggtgctgatccagaagtaccaggtgaacgagctgggcaaggagatccggccctgccggctgaagaagcggccccccgtgcggtag

SEQ ID NO: 37 - DNA, 3366 bp, synthetic construct
  misc_feature 1..3366: note = Synthetic
  source 1..3366: mol_type = other DNA
atggacggctccggcggcggctcccccaagaagaagcggaaggtgggcggctccggcggcggcgccgccttcaagcccaaccccatcaactacatcctgggcctggacatcggcatcgcctccgtgggctgggccatggtggagatcgacgaggaggagaaccccatccggctgatcgacctgggcgtgcgggtgttcgagcgggccgaggtgcccaagaccggcgactccctggccatggcccggcggctggcccggtccgtgcggcggctgacccggcggcgggcccaccggctgctgcgggcccggcggctgctgaagcgggagggcgtgctgcaggccgccgacttcgacgagaacggcctgatcaagtccctgcccaacaccccctggcagctgcgggccgccgccctggaccggaagctgacccccctggagtggtccgccgtgctgctgcacctgatcaagcaccggggctacctgtcccagcggaagaacgagggcgagaccgccgacaaggagctgggcgccctgctgaagggcgtggccaacaacgcccacgccctgcagaccggcgacttccggacccccgccgagctggccctgaacaagttcgagaaggagtccggccacatccggaaccagcggggcgactactcccacaccttctcccggaaggacctgcaggccgagctgatcctgctgttcgagaagcagaaggagttcggcaacccccacgtgtccggcggcctgaaggagggcatcgagaccctgctgatgacccagcggcccgccctgtccggcgacgccgtgcagaagatgctgggccactgcaccttcgagcccgccgagcccaaggccgccaagaacacctacaccgccgagcggttcatctggctgaccaagctgaacaacctgcggatcctggagcagggctccgagcggcccctgaccgacaccgagcgggccaccctgatggacgagccctaccggaagtccaagctgacctacgcccaggcccggaagctgctgggcctggaggacaccgccttcttcaagggcctgcggtacggcaaggacaacgccgaggcctccaccctgatggagatgaaggcctaccacgccatctcccgggccctggagaaggagggcctgaaggacaagaagtcccccctgaacctgtcctccgagctgcaggacgagatcggcaccgccttctccctgttcaagaccgacgaggacatcaccggccggctgaaggaccgggtgcagcccgagatcctggaggccctgctgaagcacatctccttcgacaagttcgtgcagatctccctgaaggccctgcggcggatcgtgcccctgatggagcagggcaagcggtacgacgaggcctgcgccgagatctacggcgaccactacggcaagaagaacaccgaggagaagatctacctgccccccatccccgccgacgagatccggaaccccgtggtgctgcgggccctgtcccaggcccggaaggtgatcaacggcgtggtgcggcggtacggctcccccgcccggatccacatcgagaccgcccgggaggtgggcaagtccttcaaggaccggaaggagatcgagaagcggcaggaggagaaccggaaggaccgggagaaggccgccgccaagttccgggagtacttccccaacttcgtgggcgagcccaagtccaaggacatcctgaagctgcggctgtacgagcagcagcacggcaagtgcctgtactccggcaaggagatcaacctggtgcggctgaacgagaagggctacgtggagatcgaccacgccctgcccttctcccggacctgggacgactccttcaacaacaaggtgctggtgctgggctccgagaaccagaacaagggcaaccagaccccctacgagtacttcaacggcaaggacaactcccgggagtggcaggagttcaaggcccgggtggagacctcccggttcccccggtccaagaagcagcggatcctgctgcagaagttcgacgaggacggcttcaaggagtgcaacctgaacgacacccggtacgtgaaccggttcctgtgccagttcgtggccgaccacatcctgctgaccggcaagggcaagcggcgggtgttcgcctccaacggccagatcaccaacctgctgcggggcttctggggcctgcggaaggtgcgggccgagaacgaccggcaccacgccctggacgccgtggtggtggcctgctccaccgtggccatgcagcagaagatcacccggttcgtgcggtacaaggagatgaacgccttcgacggcaagaccatcgacaaggagaccggcaaggtgctgcaccagaagacccacttcccccagccctgggagttcttcgcccaggaggtgatgatccgggtgttcggcaagcccgacggcaagcccgagttcgaggaggccgacacccccgagaagctgcggaccctgctggccgagaagctgtcctcccggcccgaggccgtgcacgagtacgtgacccccctgttcgtgtcccgggcccccaaccggaagatgtccggcgcccacaaggacaccctgcggtccgccaagcggttcgtgaagcacaacgagaagatctccgtgaagcgggtgtggctgaccgagatcaagctggccgacctggagaacatggtgaactacaagaacggccgggagatcgagctgtacgaggccctgaaggcccggctggaggcctacggcggcaacgccaagcaggccttcgaccccaaggacaaccccttctacaagaagggcggccagctggtgaaggccgtgcgggtggagaagacccaggagtccggcgtgctgctgaacaagaagaacgcctacaccatcgccgacaacggcgacatggtgcgggtggacgtgttctgcaaggtggacaagaagggcaagaaccagtacttcatcgtgcccatctacgcctggcaggtggccgagaacatcctgcccgacatcgactgcaagggctaccggatcgacgactcctacaccttctgcttctccctgcacaagtacgacctgatcgccttccagaaggacgagaagtccaaggtggagttcgcctactacatcaactgcgactcctccaacggccggttctacctggcctggcacgacaagggctccaaggagcagcagttccggatctccacccagaacctggtgctgatccagaagtaccaggtgaacgagctgggcaaggagatccggccctgccggctgaagaagcggccccccgtgcggtccgagtccgccacccccgagtccgtgtccggctggcggctgttcaagaagatctcctag

SEQ ID NO: 38 - DNA, 3375 bp, synthetic construct
  misc_feature 1..3375: note = Synthetic
  source 1..3375: mol_type = other DNA
atggacggctccggcggcggctcccccaagaagaagcggaaggtgggcggctccggcggcggcgccgccttcaagcccaaccccatcaactacatcctgggcctggacatcggcatcgcctccgtgggctgggccatggtggagatcgacgaggaggagaaccccatccggctgatcgacctgggcgtgcgggtgttcgagcgggccgaggtgcccaagaccggcgactccctggccatggcccggcggctggcccggtccgtgcggcggctgacccggcggcgggcccaccggctgctgcgggcccggcggctgctgaagcgggagggcgtgctgcaggccgccgacttcgacgagaacggcctgatcaagtccctgcccaacaccccctggcagctgcgggccgccgccctggaccggaagctgacccccctggagtggtccgccgtgctgctgcacctgatcaagcaccggggctacctgtcccagcggaagaacgagggcgagaccgccgacaaggagctgggcgccctgctgaagggcgtggccaacaacgcccacgccctgcagaccggcgacttccggacccccgccgagctggccctgaacaagttcgagaaggagtccggccacatccggaaccagcggggcgactactcccacaccttctcccggaaggacctgcaggccgagctgatcctgctgttcgagaagcagaaggagttcggcaacccccacgtgtccggcggcctgaaggagggcatcgagaccctgctgatgacccagcggcccgccctgtccggcgacgccgtgcagaagatgctgggccactgcaccttcgagcccgccgagcccaaggccgccaagaacacctacaccgccgagcggttcatctggctgaccaagctgaacaacctgcggatcctggagcagggctccgagcggcccctgaccgacaccgagcgggccaccctgatggacgagccctaccggaagtccaagctgacctacgcccaggcccggaagctgctgggcctggaggacaccgccttcttcaagggcctgcggtacggcaaggacaacgccgaggcctccaccctgatggagatgaaggcctaccacgccatctcccgggccctggagaaggagggcctgaaggacaagaagtcccccctgaacctgtcctccgagctgcaggacgagatcggcaccgccttctccctgttcaagaccgacgaggacatcaccggccggctgaaggaccgggtgcagcccgagatcctggaggccctgctgaagcacatctccttcgacaagttcgtgcagatctccctgaaggccctgcggcggatcgtgcccctgatggagcagggcaagcggtacgacgaggcctgcgccgagatctacggcgaccactacggcaagaagaacaccgaggagaagatctacctgccccccatccccgccgacgagatccggaaccccgtggtgctgcgggccctgtcccaggcccggaaggtgatcaacggcgtggtgcggcggtacggctcccccgcccggatccacatcgagaccgcccgggaggtgggcaagtccttcaaggaccggaaggagatcgagaagcggcaggaggagaaccggaaggaccgggagaaggccgccgccaagttccgggagtacttccccaacttcgtgggcgagcccaagtccaaggacatcctgaagctgcggctgtacgagcagcagcacggcaagtgcctgtactccggcaaggagatcaacctggtgcggctgaacgagaagggctacgtggagatcgaccacgccctgcccttctcccggacctgggacgactccttcaacaacaaggtgctggtgctgggctccgagaaccagaacaagggcaaccagaccccctacgagtacttcaacggcaaggacaactcccgggagtggcaggagttcaaggcccgggtggagacctcccggttcccccggtccaagaagcagcggatcctgctgcagaagttcgacgaggacggcttcaaggagtgcaacctgaacgacacccggtacgtgaaccggttcctgtgccagttcgtggccgaccacatcctgctgaccggcaagggcaagcggcgggtgttcgcctccaacggccagatcaccaacctgctgcggggcttctggggcctgcggaaggtgcgggccgagaacgaccggcaccacgccctggacgccgtggtggtggcctgctccaccgtggccatgcagcagaagatcacccggttcgtgcggtacaaggagatgaacgccttcgacggcaagaccatcgacaaggagaccggcaaggtgctgcaccagaagacccacttcccccagccctgggagttcttcgcccaggaggtgatgatccgggtgttcggcaagcccgacggcaagcccgagttcgaggaggccgacacccccgagaagctgcggaccctgctggccgagaagctgtcctcccggcccgaggccgtgcacgagtacgtgacccccctgttcgtgtcccgggcccccaaccggaagatgtccggcgcccacaaggacaccctgcggtccgccaagcggttcgtgaagcacaacgagaagatctccgtgaagcgggtgtggctgaccgagatcaagctggccgacctggagaacatggtgaactacaagaacggccgggagatcgagctgtacgaggccctgaaggcccggctggaggcctacggcggcaacgccaagcaggccttcgaccccaaggacaaccccttctacaagaagggcggccagctggtgaaggccgtgcgggtggagaagacccaggagtccggcgtgctgctgaacaagaagaacgcctacaccatcgccgacaacggcgacatggtgcgggtggacgtgttctgcaaggtggacaagaagggcaagaaccagtacttcatcgtgcccatctacgcctggcaggtggccgagaacatcctgcccgacatcgactgcaagggctaccggatcgacgactcctacaccttctgcttctccctgcacaagtacgacctgatcgccttccagaaggacgagaagtccaaggtggagttcgcctactacatcaactgcgactcctccaacggccggttctacctggcctggcacgacaagggctccaaggagcagcagttccggatctccacccagaacctggtgctgatccagaagtaccaggtgaacgagctgggcaaggagatccggccctgccggctgaagaagcggccccccgtgcggtccggaaagcggaccgccgacggctccggaggaggaagccccgccgccaagaagaagaagctggactag

SEQ ID NO: 39 - DNA, 3363 bp, synthetic construct
  misc_feature 1..3363: note = Synthetic
  source 1..3363: mol_type = other DNA
atggacggctccggcggcggctcccccaagaagaagcggaaggtggaggacaagcggcccgccgccaccaagaaggccggccaggccaagaagaagaagggcggctccggcggcggcgccgccttcaagcccaaccccatcaactacatcctgggcctggacatcggcatcgcctccgtgggctgggccatggtggagatcgacgaggaggagaaccccatccggctgatcgacctgggcgtgcgggtgttcgagcgggccgaggtgcccaagaccggcgactccctggccatggcccggcggctggcccggtccgtgcggcggctgacccggcggcgggcccaccggctgctgcgggcccggcggctgctgaagcgggagggcgtgctgcaggccgccgacttcgacgagaacggcctgatcaagtccctgcccaacaccccctggcagctgcgggccgccgccctggaccggaagctgacccccctggagtggtccgccgtgctgctgcacctgatcaagcaccggggctacctgtcccagcggaagaacgagggcgagaccgccgacaaggagctgggcgccctgctgaagggcgtggccaacaacgcccacgccctgcagaccggcgacttccggacccccgccgagctggccctgaacaagttcgagaaggagtccggccacatccggaaccagcggggcgactactcccacaccttctcccggaaggacctgcaggccgagctgatcctgctgttcgagaagcagaaggagttcggcaacccccacgtgtccggcggcctgaaggagggcatcgagaccctgctgatgacccagcggcccgccctgtccggcgacgccgtgcagaagatgctgggccactgcaccttcgagcccgccgagcccaaggccgccaagaacacctacaccgccgagcggttcatctggctgaccaagctgaacaacctgcggatcctggagcagggctccgagcggcccctgaccgacaccgagcgggccaccctgatggacgagccctaccggaagtccaagctgacctacgcccaggcccggaagctgctgggcctggaggacaccgccttcttcaagggcctgcggtacggcaaggacaacgccgaggcctccaccctgatggagatgaaggcctaccacgccatctcccgggccctggagaaggagggcctgaaggacaagaagtcccccctgaacctgtcctccgagctgcaggacgagatcggcaccgccttctccctgttcaagaccgacgaggacatcaccggccggctgaaggaccgggtgcagcccgagatcctggaggccctgctgaagcacatctccttcgacaagttcgtgcagatctccctgaaggccctgcggcggatcgtgcccctgatggagcagggcaagcggtacgacgaggcctgcgccgagatctacggcgaccactacggcaagaagaacaccgaggagaagatctacctgccccccatccccgccgacgagatccggaaccccgtggtgctgcgggccctgtcccaggcccggaaggtgatcaacggcgtggtgcggcggtacggctcccccgcccggatccacatcgagaccgcccgggaggtgggcaagtccttcaaggaccggaaggagatcgagaagcggcaggaggagaaccggaaggaccgggagaaggccgccgccaagttccgggagtacttccccaacttcgtgggcgagcccaagtccaaggacatcctgaagctgcggctgtacgagcagcagcacggcaagtgcctgtactccggcaaggagatcaacctggtgcggctgaacgagaagggctacgtggagatcgaccacgccctgcccttctcccggacctgggacgactccttcaacaacaaggtgctggtgctgggctccgagaaccagaacaagggcaaccagaccccctacgagtacttcaacggcaaggacaactcccgggagtggcaggagttcaaggcccgggtggagacctcccggttcccccggtccaagaagcagcggatcctgctgcagaagttcgacgaggacggcttcaaggagtgcaacctgaacgacacccggtacgtgaaccggttcctgtgccagttcgtggccgaccacatcctgctgaccggcaagggcaagcggcgggtgttcgcctccaacggccagatcaccaacctgctgcggggcttctggggcctgcggaaggtgcgggccgagaacgaccggcaccacgccctggacgccgtggtggtggcctgctccaccgtggccatgcagcagaagatcacccggttcgtgcggtacaaggagatgaacgccttcgacggcaagaccatcgacaaggagaccggcaaggtgctgcaccagaagacccacttcccccagccctgggagttcttcgcccaggaggtgatgatccgggtgttcggcaagcccgacggcaagcccgagttcgaggaggccgacacccccgagaagctgcggaccctgctggccgagaagctgtcctcccggcccgaggccgtgcacgagtacgtgacccccctgttcgtgtcccgggcccccaaccggaagatgtccggcgcccacaaggacaccctgcggtccgccaagcggttcgtgaagcacaacgagaagatctccgtgaagcgggtgtggctgaccgagatcaagctggccgacctggagaacatggtgaactacaagaacggccgggagatcgagctgtacgaggccctgaaggcccggctggaggcctacggcggcaacgccaagcaggccttcgaccccaaggacaaccccttctacaagaagggcggccagctggtgaaggccgtgcgggtggagaagacccaggagtccggcgtgctgctgaacaagaagaacgcctacaccatcgccgacaacggcgacatggtgcgggtggacgtgttctgcaaggtggacaagaagggcaagaaccagtacttcatcgtgcccatctacgcctggcaggtggccgagaacatcctgcccgacatcgactgcaagggctaccggatcgacgactcctacaccttctgcttctccctgcacaagtacgacctgatcgccttccagaaggacgagaagtccaaggtggagttcgcctactacatcaactgcgactcctccaacggccggttctacctggcctggcacgacaagggctccaaggagcagcagttccggatctccacccagaacctggtgctgatccagaagtaccaggtgaacgagctgggcaaggagatccggccctgccggctgaagaagcggccccccgtgcggtag

SEQ ID NO: 40 - DNA, 3420 bp, synthetic construct
  misc_feature 1..3420: note = Synthetic
  source 1..3420: mol_type = other DNA
atggacggctccggcggcggctcccccaagaagaagcggaaggtggaggacaagcggcccgccgccaccaagaaggccggccaggccaagaagaagaagggcggctccggcggcggcgccgccttcaagcccaaccccatcaactacatcctgggcctggacatcggcatcgcctccgtgggctgggccatggtggagatcgacgaggaggagaaccccatccggctgatcgacctgggcgtgcgggtgttcgagcgggccgaggtgcccaagaccggcgactccctggccatggcccggcggctggcccggtccgtgcggcggctgacccggcggcgggcccaccggctgctgcgggcccggcggctgctgaagcgggagggcgtgctgcaggccgccgacttcgacgagaacggcctgatcaagtccctgcccaacaccccctggcagctgcgggccgccgccctggaccggaagctgacccccctggagtggtccgccgtgctgctgcacctgatcaagcaccggggctacctgtcccagcggaagaacgagggcgagaccgccgacaaggagctgggcgccctgctgaagggcgtggccaacaacgcccacgccctgcagaccggcgacttccggacccccgccgagctggccctgaacaagttcgagaaggagtccggccacatccggaaccagcggggcgactactcccacaccttctcccggaaggacctgcaggccgagctgatcctgctgttcgagaagcagaaggagttcggcaacccccacgtgtccggcggcctgaaggagggcatcgagaccctgctgatgacccagcggcccgccctgtccggcgacgccgtgcagaagatgctgggccactgcaccttcgagcccgccgagcccaaggccgccaagaacacctacaccgccgagcggttcatctggctgaccaagctgaacaacctgcggatcctggagcagggctccgagcggcccctgaccgacaccgagcgggccaccctgatggacgagccctaccggaagtccaagctgacctacgcccaggcccggaagctgctgggcctggaggacaccgccttcttcaagggcctgcggtacggcaaggacaacgccgaggcctccaccctgatggagatgaaggcctaccacgccatctcccgggccctggagaaggagggcctgaaggacaagaagtcccccctgaacctgtcctccgagctgcaggacgagatcggcaccgccttctccctgttcaagaccgacgaggacatcaccggccggctgaaggaccgggtgcagcccgagatcctggaggccctgctgaagcacatctccttcgacaagttcgtgcagatctccctgaaggccctgcggcggatcgtgcccctgatggagcagggcaagcggtacgacgaggcctgcgccgagatctacggcgaccactacggcaagaagaacaccgaggagaagatctacctgccccccatccccgccgacgagatccggaaccccgtggtgctgcgggccctgtcccaggcccggaaggtgatcaacggcgtggtgcggcggtacggctcccccgcccggatccacatcgagaccgcccgggaggtgggcaagtccttcaaggaccggaaggagatcgagaagcggcaggaggagaaccggaaggaccgggagaaggccgccgccaagttccgggagtacttccccaacttcgtgggcgagcccaagtccaaggacatcctgaagctgcggctgtacgagcagcagcacggcaagtgcctgtactccggcaaggagatcaacctggtgcggctgaacgagaagggctacgtggagatcgaccacgccctgcccttctcccggacctgggacgactccttcaacaacaaggtgctggtgctgggctccgagaaccagaacaagggcaaccagaccccctacgagtacttcaacggcaaggacaactcccgggagtggcaggagttcaaggcccgggtggagacctcccggttcccccggtccaagaagcagcggatcctgctgcagaagttcgacgaggacggcttcaaggagtgcaacctgaacgacacccggtacgtgaaccggttcctgtgccagttcgtggccgaccacatcctgctgaccggcaagggcaagcggcgggtgttcgcctccaacggccagatcaccaacctgctgcggggcttctggggcctgcggaaggtgcgggccgagaacgaccggcaccacgccctggacgccgtggtggtggcctgctccaccgtggccatgcagcagaagatcacccggttcgtgcggtacaaggagatgaacgccttcgacggcaagaccatcgacaaggagaccggcaaggtgctgcaccagaagacccacttcccccagccctgggagttcttcgcccaggaggtgatgatccgggtgttcggcaagcccgacggcaagcccgagttcgaggaggccgacacccccgagaagctgcggaccctgctggccgagaagctgtcctcccggcccgaggccgtgcacgagtacgtgacccccctgttcgtgtcccgggcccccaaccggaagatgtccggcgcccacaaggacaccctgcggtccgccaagcggttcgtgaagcacaacgagaagatctccgtgaagcgggtgtggctgaccgagatcaagctggccgacctggagaacatggtgaactacaagaacggccgggagatcgagctgtacgaggccctgaaggcccggctggaggcctacggcggcaacgccaagcaggccttcgaccccaaggacaaccccttctacaagaagggcggccagctggtgaaggccgtgcgggtggagaagacccaggagtccggcgtgctgctgaacaagaagaacgcctacaccatcgccgacaacggcgacatggtgcgggtggacgtgttctgcaaggtggacaagaagggcaagaaccagtacttcatcgtgcccatctacgcctggcaggtggccgagaacatcctgcccgacatcgactgcaagggctaccggatcgacgactcctacaccttctgcttctccctgcacaagtacgacctgatcgccttccagaaggacgagaagtccaaggtggagttcgcctactacatcaactgcgactcctccaacggccggttctacctggcctggcacgacaagggctccaaggagcagcagttccggatctccacccagaacctggtgctgatccagaagtaccaggtgaacgagctgggcaaggagatccggccctgccggctgaagaagcggccccccgtgcggtccgagtccgccacccccgagtccgtgtccggctggcggctgttcaagaagatctcctag

SEQ ID NO: 41 - DNA, 3342 bp, synthetic construct
  misc_feature 1..3342: note = Synthetic
  source 1..3342: mol_type = other DNA
atggacggctccggcggcggctccgaggacaagcggcccgccgccaccaagaaggccggccaggccaagaagaagaagggcggctccggcggcggcgccgccttcaagcccaaccccatcaactacatcctgggcctggacatcggcatcgcctccgtgggctgggccatggtggagatcgacgaggaggagaaccccatccggctgatcgacctgggcgtgcgggtgttcgagcgggccgaggtgcccaagaccggcgactccctggccatggcccggcggctggcccggtccgtgcggcggctgacccggcggcgggcccaccggctgctgcgggcccggcggctgctgaagcgggagggcgtgctgcaggccgccgacttcgacgagaacggcctgatcaagtccctgcccaacaccccctggcagctgcgggccgccgccctggaccggaagctgacccccctggagtggtccgccgtgctgctgcacctgatcaagcaccggggctacctgtcccagcggaagaacgagggcgagaccgccgacaaggagctgggcgccctgctgaagggcgtggccaacaacgcccacgccctgcagaccggcgacttccggacccccgccgagctggccctgaacaagttcgagaaggagtccggccacatccggaaccagcggggcgactactcccacaccttctcccggaaggacctgcaggccgagctgatcctgctgttcgagaagcagaaggagttcggcaacccccacgtgtccggcggcctgaaggagggcatcgagaccctgctgatgacccagcggcccgccctgtccggcgacgccgtgcagaagatgctgggccactgcaccttcgagcccgccgagcccaaggccgccaagaacacctacaccgccgagcggttcatctggctgaccaagctgaacaacctgcggatcctggagcagggctccgagcggcccctgaccgacaccgagcgggccaccctgatggacgagccctaccggaagtccaagctgacctacgcccaggcccggaagctgctgggcctggaggacaccgccttcttcaagggcctgcggtacggcaaggacaacgccgaggcctccaccctgatggagatgaaggcctaccacgccatctcccgggccctggagaaggagggcctgaaggacaagaagtcccccctgaacctgtcctccgagctgcaggacgagatcggcaccgccttctccctgttcaagaccgacgaggacatcaccggccggctgaaggaccgggtgcagcccgagatcctggaggccctgctgaagcacatctccttcgacaagttcgtgcagatctccctgaaggccctgcggcggatcgtgcccctgatggagcagggcaagcggtacgacgaggcctgcgccgagatctacggcgaccactacggcaagaagaacaccgaggagaagatctacctgccccccatccccgccgacgagatccggaaccccgtggtgctgcgggccctgtcccaggcccggaaggtgatcaacggcgtggtgcggcggtacggctcccccgcccggatccacatcgagaccgcccgggaggtgggcaagtccttcaaggaccggaaggagatcgagaagcggcaggaggagaaccggaaggaccgggagaaggccgccgccaagttccgggagtacttccccaacttcgtgggcgagcccaagtccaaggacatcctgaagctgcggctgtacgagcagcagcacggcaagtgcctgtactccggcaaggagatcaacctggtgcggctgaacgagaagggctacgtggagatcgaccacgccctgcccttctcccggacctgggacgactccttcaacaacaaggtgctggtgctgggctccgagaaccagaacaagggcaaccagaccccctacgagtacttcaacggcaaggacaactcccgggagtggcaggagttcaaggcccgggtggagacctcccggttcccccggtccaagaagcagcggatcctgctgcagaagttcgacgaggacggcttcaaggagtgcaacctgaacgacacccggtacgtgaaccggttcctgtgccagttcgtggccgaccacatcctgctgaccggcaagggcaagcggcgggtgttcgcctccaacggccagatcaccaacctgctgcggggcttctggggcctgcggaaggtgcgggccgagaacgaccggcaccacgccctggacgccgtggtggtggcctgctccaccgtggccatgcagcagaagatcacccggttcgtgcggtacaaggagatgaacgccttcgacggcaagaccatcgacaaggagaccggcaaggtgctgcaccagaagacccacttcccccagccctgggagttcttcgcccaggaggtgatgatccgggtgttcggcaagcccgacggcaagcccgagttcgaggaggccgacacccccgagaagctgcggaccctgctggccgagaagctgtcctcccggcccgaggccgtgcacgagtacgtgacccccctgttcgtgtcccgggcccccaaccggaagatgtccggcgcccacaaggacaccctgcggtccgccaagcggttcgtgaagcacaacgagaagatctccgtgaagcgggtgtggctgaccgagatcaagctggccgacctggagaacatggtgaactacaagaacggccgggagatcgagctgtacgaggccctgaaggcccggctggaggcctacggcggcaacgccaagcaggccttcgaccccaaggacaaccccttctacaagaagggcggccagctggtgaaggccgtgcgggtggagaagacccaggagtccggcgtgctgctgaacaagaagaacgcctacaccatcgccgacaacggcgacatggtgcgggtggacgtgttctgcaaggtggacaagaagggcaagaaccagtacttcatcgtgcccatctacgcctggcaggtggccgagaacatcctgcccgacatcgactgcaagggctaccggatcgacgactcctacaccttctgcttctccctgcacaagtacgacctgatcgccttccagaaggacgagaagtccaaggtggagttcgcctactacatcaactgcgactcctccaacggccggttctacctggcctggcacgacaagggctccaaggagcagcagttccggatctccacccagaacctggtgctgatccagaagtaccaggtgaacgagctgggcaaggagatccggccctgccggctgaagaagcggccccccgtgcggtag

SEQ ID NO: 42 - DNA, 4005 bp, synthetic construct
  misc_feature 1..4005: note = Synthetic
  source 1..4005: mol_type = other DNA
atggacggctccggcggcggctcccccaagaagaagcggaaggtggaggacaagcggcccgccgccaccaagaaggccggccaggccaagaagaagaagggcggctccggcggcggcgaggcctcccccgcctccggcccccggcacctgatggacccccacatcttcacctccaacttcaacaacggcatcggccggcacaagacctacctgtgctacgaggtggagcggctggacaacggcacctccgtgaagatggaccagcaccggggcttcctgcacaaccaggccaagaacctgctgtgcggcttctacggccggcacgccgagctgcggttcctggacctggtgccctccctgcagctggaccccgcccagatctaccgggtgacctggttcatctcctggtccccctgcttctcctggggctgcgccggcgaggtgcgggccttcctgcaggagaacacccacgtgcggctgcggatcttcgccgcccggatctacgactacgaccccctgtacaaggaggccctgcagatgctgcgggacgccggcgcccaggtgtccatcatgacctacgacgagttcaagcactgctgggacaccttcgtggaccaccagggctgccccttccagccctgggacggcctggacgagcactcccaggccctgtccggccggctgcgggccatcctgcagaaccagggcaactccggctccgagacccccggcacctccgagtccgccacccccgagtccgcagcgttcaaaccaaatcccatcaactacatcctgggcctggccatcggcatcgcctccgtgggctgggccatggtggagatcgacgaggaggagaaccccatccggctgatcgacctgggcgtgcgggtgttcgagcgggccgaggtgcccaagaccggcgactccctggccatggcccggcggctggcccggtccgtgcggcggctgacccggcggcgggcccaccggctgctgcgggcccggcggctgctgaagcgggagggcgtgctgcaggccgccgacttcgacgagaacggcctgatcaagtccctgcccaacaccccctggcagctgcgggccgccgccctggaccggaagctgacccccctggagtggtccgccgtgctgctgcacctgatcaagcaccggggctacctgtcccagcggaagaacgagggcgagaccgccgacaaggagctgggcgccctgctgaagggcgtggccaacaacgcccacgccctgcagaccggcgacttccggacccccgccgagctggccctgaacaagttcgagaaggagtccggccacatccggaaccagcggggcgactactcccacaccttctcccggaaggacctgcaggccgagctgatcctgctgttcgagaagcagaaggagttcggcaacccccacgtgtccggcggcctgaaggagggcatcgagaccctgctgatgacccagcggcccgccctgtccggcgacgccgtgcagaagatgctgggccactgcaccttcgagcccgccgagcccaaggccgccaagaacacctacaccgccgagcggttcatctggctgaccaagctgaacaacctgcggatcctggagcagggctccgagcggcccctgaccgacaccgagcgggccaccctgatggacgagccctaccggaagtccaagctgacctacgcccaggcccggaagctgctgggcctggaggacaccgccttcttcaagggcctgcggtacggcaaggacaacgccgaggcctccaccctgatggagatgaaggcctaccacgccatctcccgggccctggagaaggagggcctgaaggacaagaagtcccccctgaacctgtcctccgagctgcaggacgagatcggcaccgccttctccctgttcaagaccgacgaggacatcaccggccggctgaaggaccgggtgcagcccgagatcctggaggccctgctgaagcacatctccttcgacaagttcgtgcagatctccctgaaggccctgcggcggatcgtgcccctgatggagcagggcaagcggtacgacgaggcctgcgccgagatctacggcgaccactacggcaagaagaacaccgaggagaagatctacctgccccccatccccgccgacgagatccggaaccccgtggtgctgcgggccctgtcccaggcccggaaggtgatcaacggcgtggtgcggcggtacggctcccccgcccggatccacatcgagaccgcccgggaggtgggcaagtccttcaaggaccggaaggagatcgagaagcggcaggaggagaaccggaaggaccgggagaaggccgccgccaagttccgggagtacttccccaacttcgtgggcgagcccaagtccaaggacatcctgaagctgcggctgtacgagcagcagcacggcaagtgcctgtactccggcaaggagatcaacctggtgcggctgaacgagaagggctacgtggagatcgaccacgccctgcccttctcccggacctgggacgactccttcaacaacaaggtgctggtgctgggctccgagaaccagaacaagggcaaccagaccccctacgagtacttcaacggcaaggacaactcccgggagtggcaggagttcaaggcccgggtggagacctcccggttcccccggtccaagaagcagcggatcctgctgcagaagttcgacgaggacggcttcaaggagtgcaacctgaacgacacccggtacgtgaaccgcttcctgtgccagttcgtggccgaccacatcctgctgaccggcaagggcaagcggcgggtgttcgcctccaacggccagatcaccaacctgctgcggggcttctggggcctgcggaaggtgcgggccgagaacgaccggcaccacgccctggacgccgtggtggtggcctgctccaccgtggccatgcagcagaagatcacccggttcgtgcggtacaaggagatgaacgccttcgacggcaagaccatcgacaaggagaccggcaaggtgctgcaccagaagacccacttcccccagccctgggagttcttcgcccaggaggtgatgatccgggtgttcggcaagcccgacggcaagcccgagttcgaggaggccgacacccccgagaagctgcggaccctgctggccgagaagctgtcctcccggcccgaggccgtgcacgagtacgtgacccccctgttcgtgtcccgggcccccaaccggaagatgtccggcgcccacaaggacaccctgcggtccgccaagcggttcgtgaagcacaacgagaagatctccgtgaagcgggtgtggctgaccgagatcaagctggccgacctggagaacatggtgaactacaagaacggccgggagatcgagctgtacgaggccctgaaggcccggctggaggcctacggcggcaacgccaagcaggccttcgaccccaaggacaaccccttctacaagaagggcggccagctggtgaaggccgtgcgggtggagaagacccaggagtccggcgtgctgctgaacaagaagaacgcctacaccatcgccgacaacggcgacatggtgcgggtggacgtgttctgcaaggtggacaagaagggcaagaaccagtacttcatcgtgcccatctacgcctggcaggtggccgagaacatcctgcccgacatcgactgcaagggctaccggatcgacgactcctacaccttctgcttctccctgcacaagtacgacctgatcgccttccagaaggacgagaagtccaaggtggagttcgcctactacatcaactgcgactcctccaacggccggttctacctggcctggcacgacaagggctccaaggagcagcagttccggatctccacccagaacctggtgctgatccagaagtaccaggtgaacgagctgggcaaggagatccggccctgccggctgaagaagcggccccccgtgcggtag

SEQ ID NO: 43 - DNA, 4140 bp, Streptococcus pyogenes
  source 1..4140: mol_type = genomic DNA
atggacaagaagtacagcatcggactggacatcggaacaaacagcgtcggatgggcagtcatcacagacgaatacaaggtcccgagcaagaagttcaaggtcctgggaaacacagacagacacagcatcaagaagaacctgatcggagcactgctgttcgacagcggagaaacagcagaagcaacaagactgaagagaacagcaagaagaagatacacaagaagaaagaacagaatctgctacctgcaggaaatcttcagcaacgaaatggcaaaggtcgacgacagcttcttccacagactggaagaaagcttcctggtcgaagaagacaagaagcacgaaagacacccgatcttcggaaacatcgtcgacgaagtcgcataccacgaaaagtacccgacaatctaccacctgagaaagaagctggtcgacagcacagacaaggcagacctgagactgatctacctggcactggcacacatgatcaagttcagaggacacttcctgatcgaaggagacctgaacccggacaacagcgacgtcgacaagctgttcatccagctggtccagacatacaaccagctgttcgaagaaaacccgatcaacgcaagcggagtcgacgcaaaggcaatcctgagcgcaagactgagcaagagcagaagactggaaaacctgatcgcacagctgccgggagaaaagaagaacggactgttcggaaacctgatcgcactgagcctgggactgacaccgaacttcaagagcaacttcgacctggcagaagacgcaaagctgcagctgagcaaggacacatacgacgacgacctggacaacctgctggcacagatcggagaccagtacgcagacctgttcctggcagcaaagaacctgagcgacgcaatcctgctgagcgacatcctgagagtcaacacagaaatcacaaaggcaccgctgagcgcaagcatgatcaagagatacgacgaacaccaccaggacctgacactgctgaaggcactggtcagacagcagctgccggaaaagtacaaggaaatcttcttcgaccagagcaagaacggatacgcaggatacatcgacggaggagcaagccaggaagaattctacaagttcatcaagccgatcctggaaaagatggacggaacagaagaactgctggtcaagctgaacagagaagacctgctgagaaagcagagaacattcgacaacggaagcatcccgcaccagatccacctgggagaactgcacgcaatcctgagaagacaggaagacttctacccgttcctgaaggacaacagagaaaagatcgaaaagatcctgacattcagaatcccgtactacgtcggaccgctggcaagaggaaacagcagattcgcatggatgacaagaaagagcgaagaaacaatcacaccgtggaacttcgaagaagtcgtcgacaagggagcaagcgcacagagcttcatcgaaagaatgacaaacttcgacaagaacctgccgaacgaaaaggtcctgccgaagcacagcctgctgtacgaatacttcacagtctacaacgaactgacaaaggtcaagtacgtcacagaaggaatgagaaagccggcattcctgagcggagaacagaagaaggcaatcgtcgacctgctgttcaagacaaacagaaaggtcacagtcaagcagctgaaggaagactacttcaagaagatcgaatgcttcgacagcgtcgaaatcagcggagtcgaagacagattcaacgcaagcctgggaacataccacgacctgctgaagatcatcaaggacaaggacttcctggacaacgaagaaaacgaagacatcctggaagacatcgtcctgacactgacactgttcgaagacagagaaatgatcgaagaaagactgaagacatacgcacacctgttcgacgacaaggtcatgaagcagctgaagagaagaagatacacaggatggggaagactgagcagaaagctgatcaacggaatcagagacaagcagagcggaaagacaatcctggacttcctgaagagcgacggattcgcaaacagaaacttcatgcagctgatccacgacgacagcctgacattcaaggaagacatccagaaggcacaggtcagcggacagggagacagcctgcacgaacacatcgcaaacctggcaggaagcccggcaatcaagaagggaatcctgcagacagtcaaggtcgtcgacgaactggtcaaggtcatgggaagacacaagccggaaaacatcgtcatcgaaatggcaagagaaaaccagacaacacagaagggacagaagaacagcagagaaagaatgaagagaatcgaagaaggaatcaaggaactgggaagccagatcctgaaggaacacccggtcgaaaacacacagctgcagaacgaaaagctgtacctgtactacctgcagaacggaagagacatgtacgtcgaccaggaactggacatcaacagactgagcgactacgacgtcgaccacatcgtcccgcagagcttcctgaaggacgacagcatcgacaacaaggtcctgacaagaagcgacaagaacagaggaaagagcgacaacgtcccgagcgaagaagtcgtcaagaagatgaagaactactggagacagctgctgaacgcaaagctgatcacacagagaaagttcgacaacctgacaaaggcagagagaggaggactgagcgaactggacaaggcaggattcatcaagagacagctggtcgaaacaagacagatcacaaagcacgtcgcacagatcctggacagcagaatgaacacaaagtacgacgaaaacgacaagctgatcagagaagtcaaggtcatcacactgaagagcaagctggtcagcgacttcagaaaggacttccagttctacaaggtcagagaaatcaacaactaccaccacgcacacgacgcatacctgaacgcagtcgtcggaacagcactgatcaagaagtacccgaagctggaaagcgaattcgtctacggagactacaaggtctacgacgtcagaaagatgatcgcaaagagcgaacaggaaatcggaaaggcaacagcaaagtacttcttctacagcaacatcatgaacttcttcaagacagaaatcacactggcaaacggagaaatcagaaagagaccgctgatcgaaacaaacggagaaacaggagaaatcgtctgggacaagggaagagacttcgcaacagtcagaaaggtcctgagcatgccgcaggtcaacatcgtcaagaagacagaagtccagacaggaggattcagcaaggaaagcatcctgccgaagagaaacagcgacaagctgatcgcaagaaagaaggactgggacccgaagaagtacggaggattcgacagcccgacagtcgcatacagcgtcctggtcgtcgcaaaggtcgaaaagggaaagagcaagaagctgaagagcgtcaaggaactgctgggaatcacaatcatggaaagaagcagcttcgaaaagaacccgatcgacttcctggaagcaaagggatacaaggaagtcaagaaggacctgatcatcaagctgccgaagtacagcctgttcgaactggaaaacggaagaaagagaatgctggcaagcgcaggagaactgcagaagggaaacgaactggcactgccgagcaagtacgtcaacttcctgtacctggcaagccactacgaaaagctgaagggaagcccggaagacaacgaacagaagcagctgttcgtcgaacagcacaagcactacctggacgaaatcatcgaacagatcagcgaattcagcaagagagtcatcctggcagacgcaaacctggacaaggtcctgagcgcatacaacaagcacagagacaagccgatcagagaacaggcagaaaacatcatccacctgttcacactgacaaacctgggagcaccggcagcattcaagtacttcgacacaacaatcgacagaaagagatacacaagcacaaaggaagtcctggacgcaacactgatccaccagagcatcacaggactgtacgaaacaagaatcgacctgagccagctgggaggagacggaggaggaagcccgaagaagaagagaaaggtctag

SEQ ID NO: 44 - DNA, 4140 bp, Streptococcus pyogenes
  source 1..4140: mol_type = genomic DNA
atggacaagaagtactccatcggcctggacatcggcaccaactccgtgggctgggccgtgatcaccgacgagtacaaggtgccctccaagaagttcaaggtgctgggcaacaccgaccggcactccatcaagaagaacctgatcggcgccctgctgttcgactccggcgagaccgccgaggccacccggctgaagcggaccgcccggcggcggtacacccggcggaagaaccggatctgctacctgcaggagatcttctccaacgagatggccaaggtggacgactccttcttccaccggctggaggagtccttcctggtggaggaggacaagaagcacgagcggcaccccatcttcggcaacatcgtggacgaggtggcctaccacgagaagtaccccaccatctaccacctgcggaagaagctggtggactccaccgacaaggccgacctgcggctgatctacctggccctggcccacatgatcaagttccggggccacttcctgatcgagggcgacctgaaccccgacaactccgacgtggacaagctgttcatccagctggtgcagacctacaaccagctgttcgaggagaaccccatcaacgcctccggcgtggacgccaaggccatcctgtccgcccggctgtccaagtcccggcggctggagaacctgatcgcccagctgcccggcgagaagaagaacggcctgttcggcaacctgatcgccctgtccctgggcctgacccccaacttcaagtccaacttcgacctggccgaggacgccaagctgcagctgtccaaggacacctacgacgacgacctggacaacctgctggcccagatcggcgaccagtacgccgacctgttcctggccgccaagaacctgtccgacgccatcctgctgtccgacatcctgcgggtgaacaccgagatcaccaaggcccccctgtccgcctccatgatcaagcggtacgacgagcaccaccaggacctgaccctgctgaaggccctggtgcggcagcagctgcccgagaagtacaaggagatcttcttcgaccagtccaagaacggctacgccggctacatcgacggcggcgcctcccaggaggagttctacaagttcatcaagcccatcctggagaagatggacggcaccgaggagctgctggtgaagctgaaccgggaggacctgctgcggaagcagcggaccttcgacaacggctccatcccccaccagatccacctgggcgagctgcacgccatcctgcggcggcaggaggacttctaccccttcctgaaggacaaccgggagaagatcgagaagatcctgaccttccggatcccctactacgtgggccccctggcccggggcaactcccggttcgcctggatgacccggaagtccgaggagaccatcaccccctggaacttcgaggaggtggtggacaagggcgcctccgcccagtccttcatcgagcggatgaccaacttcgacaagaacctgcccaacgagaaggtgctgcccaagcactccctgctgtacgagtacttcaccgtgtacaacgagctgaccaaggtgaagtacgtgaccgagggcatgcggaagcccgccttcctgtccggcgagcagaagaaggccatcgtggacctgctgttcaagaccaaccggaaggtgaccgtgaagcagctgaaggaggactacttcaagaagatcgagtgcttcgactccgtggagatctccggcgtggaggaccggttcaacgcctccctgggcacctaccacgacctgctgaagatcatcaaggacaaggacttcctggacaacgaggagaacgaggacatcctggaggacatcgtgctgaccctgaccctgttcgaggaccgggagatgatcgaggagcggctgaagacctacgcccacctgttcgacgacaaggtgatgaagcagctgaagcggcggcggtacaccggctggggccggctgtcccggaagctgatcaacggcatccgggacaagcagtccggcaagaccatcctggacttcctgaagtccgacggcttcgccaaccggaacttcatgcagctgatccacgacgactccctgaccttcaaggaggacatccagaaggcccaggtgtccggccagggcgactccctgcacgagcacatcgccaacctggccggctcccccgccatcaagaagggcatcctgcagaccgtgaaggtggtggacgagctggtgaaggtgatgggccggcacaagcccgagaacatcgtgatcgagatggcccgggagaaccagaccacccagaagggccagaagaactcccgggagcggatgaagcggatcgaggagggcatcaaggagctgggctcccagatcctgaaggagcaccccgtggagaacacccagctgcagaacgagaagctgtacctgtactacctgcagaacggccgggacatgtacgtggaccaggagctggacatcaaccggctgtccgactacgacgtggaccacatcgtgccccagtccttcctgaaggacgactccatcgacaacaaggtgctgacccggtccgacaagaaccggggcaagtccgacaacgtgccctccgaggaggtggtgaagaagatgaagaactactggcggcagctgctgaacgccaagctgatcacccagcggaagttcgacaacctgaccaaggccgagcggggcggcctgtccgagctggacaaggccggcttcatcaagcggcagctggtggagacccggcagatcaccaagcacgtggcccagatcctggactcccggatgaacaccaagtacgacgagaacgacaagctgatccgggaggtgaaggtgatcaccctgaagtccaagctggtgtccgacttccggaaggacttccagttctacaaggtgcgggagatcaacaactaccaccacgcccacgacgcctacctgaacgccgtggtgggcaccgccctgatcaagaagtaccccaagctggagtccgagttcgtgtacggcgactacaaggtgtacgacgtgcggaagatgatcgccaagtccgagcaggagatcggcaaggccaccgccaagtacttcttctactccaacatcatgaacttcttcaagaccgagatcaccctggccaacggcgagatccggaagcggcccctgatcgagaccaacggcgagaccggcgagatcgtgtgggacaagggccgggacttcgccaccgtgcggaaggtgctgtccatgccccaggtgaacatcgtgaagaagaccgaggtgcagaccggcggcttctccaaggagtccatcctgcccaagcggaactccgacaagctgatcgcccggaagaaggactgggaccccaagaagtacggcggcttcgactcccccaccgtggcctactccgtgctggtggtggccaaggtggagaagggcaagtccaagaagctgaagtccgtgaaggagctgctgggcatcaccatcatggagcggtcctccttcgagaagaaccccatcgacttcctggaggccaagggctacaaggaggtgaagaaggacctgatcatcaagctgcccaagtactccctgttcgagctggagaacggccggaagcggatgctggcctccgccggcgagctgcagaagggcaacgagctggccctgccctccaagtacgtgaacttcctgtacctggcctcccactacgagaagctgaagggctcccccgaggacaacgagcagaagcagctgttcgtggagcagcacaagcactacctggacgagatcatcgagcagatctccgagttctccaagcgggtgatcctggccgacgccaacctggacaaggtgctgtccgcctacaacaagcaccgggacaagcccatccgggagcaggccgagaacatcatccacctgttcaccctgaccaacctgggcgcccccgccgccttcaagtacttcgacaccaccatcgaccggaagcggtacacctccaccaaggaggtgctggacgccaccctgatccaccagtccatcaccggcctgtacgagacccggatcgacctgtcccagctgggcggcgacggcggcggctcccccaagaagaagcggaaggtgtga

SEQ ID NO: 45 - RNA, 4140 nt, synthetic construct
  misc_feature 1..4140: note = Synthetic
  source 1..4140: mol_type = other RNA
atggacaagaagtacagcatcggcctggacatcggcacgaacagcgttggctgggctgtgatcacggacgagtacaaggttccctcaaagaagttcaaggtgctgggcaacacggaccggcacagcatcaagaagaatctcatcggtgcactgctgttcgacagcggtgagacggccgaagccacgcggctgaagcggacggcccgccggcggtacacgcggcggaagaaccggatctgctacctgcaggagatcttcagcaacgagatggccaaggtggacgacagcttcttccaccggctggaggagagcttcctggtggaggaggacaagaagcacgagcggcaccccatcttcggcaacatcgtggacgaagtcgcctaccacgagaagtaccccaccatctaccacctgcggaagaagctggtggactcgactgacaaggccgacctgcggctgatctacctggcactggcccacatgataaagttccggggccacttcctgatcgagggcgacctgaaccctgacaacagcgacgtggacaagctgttcatccagctggtgcagacctacaaccagctgttcgaggagaaccccatcaacgccagcggcgtggacgccaaggccatcctcagcgcccgcctcagcaagagccggcggctggagaatctcatcgcccagcttccaggtgagaagaagaatgggctgttcggcaatctcatcgcactcagcctgggcctgactcccaacttcaagagcaacttcgacctggccgaggacgccaagctgcagctcagcaaggacacctacgacgacgacctggacaatctcctggcccagatcggcgaccagtacgccgacctgttcctggctgccaagaatctcagcgacgccatcctgctcagcgacatcctgcgggtgaacacagagatcacgaaggcccccctcagcgccagcatgataaagcggtacgacgagcaccaccaggacctgacgctgctgaaggcactggtgcggcagcagcttccagagaagtacaaggagatcttcttcgaccagagcaagaatgggtacgccgggtacatcgacggtggtgccagccaggaggagttctacaagttcatcaagcccatcctggagaagatggacggcacagaggagctgctggtgaagctgaacagggaggacctgctgcggaagcagcggacgttcgacaatgggagcatcccccaccagatccacctgggtgagctgcacgccatcctgcggcggcaggaggacttctaccccttcctgaaggacaacagggagaagatcgagaagatcctgacgttccggatcccctactacgttggccccctggcccgcggcaacagccggttcgcctggatgacgcggaagagcgaggagacgatcactccctggaacttcgaggaagtcgtggacaagggtgccagcgcccagagcttcatcgagcggatgacgaacttcgacaagaatcttccaaacgagaaggtgcttccaaagcacagcctgctgtacgagtacttcacggtgtacaacgagctgacgaaggtgaagtacgtgacagagggcatgcggaagcccgccttcctcagcggtgagcagaagaaggccatcgtggacctgctgttcaagacgaaccggaaggtgacggtgaagcagctgaaggaggactacttcaagaagatcgagtgcttcgacagcgtggagatcagcggcgtggaggaccggttcaacgccagcctgggcacctaccacgacctgctgaagatcatcaaggacaaggacttcctggacaacgaggagaacgaggacatcctggaggacatcgtgctgacgctgacgctgttcgaggacagggagatgatagaggagcggctgaagacctacgcccacctgttcgacgacaaggtgatgaagcagctgaagcggcggcggtacacgggctggggccggctcagccggaagctgatcaatgggatccgagacaagcagagcggcaagacgatcctggacttcctgaagagcgacggcttcgccaaccggaacttcatgcagctgatccacgacgacagcctgacgttcaaggaggacatccagaaggcccaggtcagcggccagggcgacagcctgcacgagcacatcgccaatctcgccgggagccccgccatcaagaaggggatcctgcagacggtgaaggtggtggacgagctggtgaaggtgatgggccggcacaagccagagaacatcgtgatcgagatggccagggagaaccagacgactcaaaaggggcagaagaacagcagggagcggatgaagcggatcgaggagggcatcaaggagctgggcagccagatcctgaaggagcaccccgtggagaacactcaactgcagaacgagaagctgtacctgtactacctgcagaatgggcgagacatgtacgtggaccaggagctggacatcaaccggctcagcgactacgacgtggaccacatcgttccccagagcttcctgaaggacgacagcatcgacaacaaggtgctgacgcggagcgacaagaaccggggcaagagcgacaacgttccctcagaggaagtcgtgaagaagatgaagaactactggcggcagctgctgaacgccaagctgatcactcaacggaagttcgacaatctcacgaaggccgagcggggtggcctcagcgagctggacaaggccgggttcatcaagcggcagctggtggagacgcggcagatcacgaagcacgtggcccagatcctggacagccggatgaacacgaagtacgacgagaacgacaagctgatcagggaagtcaaggtgatcacgctgaagagcaagctggtcagcgacttccggaaggacttccagttctacaaggtgagggagatcaacaactaccaccacgcccacgacgcctacctgaacgctgtggttggcacggcactgatcaagaagtaccccaagctggagagcgagttcgtgtacggcgactacaaggtgtacgacgtgcggaagatgatagccaagagcgagcaggagatcggcaaggccacggccaagtacttcttctacagcaacatcatgaacttcttcaagacagagatcacgctggccaatggtgagatccggaagcggcccctgatcgagacgaatggtgagacgggtgagatcgtgtgggacaaggggcgagacttcgccacggtgcggaaggtgctcagcatgccccaggtgaacatcgtgaagaagacagaagtccagacgggtggcttcagcaaggagagcatccttccaaagcggaacagcgacaagctgatcgcccgcaagaaggactgggaccccaagaagtacggtggcttcgacagccccaccgtggcctacagcgtgctggtggtggccaaggtggagaaggggaagagcaagaagctgaagagcgtgaaggagctgctgggcatcacgatcatggagcggagcagcttcgagaagaaccccatcgacttcctggaagccaaggggtacaaggaagtcaagaaggacctgatcatcaagcttccaaagtacagcctgttcgagctggagaatgggcggaagcggatgctggccagcgccggtgagctgcagaaggggaacgagctggcacttccctcaaagtacgtgaacttcctgtacctggccagccactacgagaagctgaaggggagcccagaggacaacgagcagaagcagctgttcgtggagcagcacaagcactacctggacgagatcatcgagcagatcagcgagttcagcaagcgggtgatcctggccgacgccaatctcgacaaggtgctcagcgcctacaacaagcaccgagacaagcccatcagggagcaggccgagaacatcatccacctgttcacgctgacgaatctcggtgcccccgctgccttcaagtacttcgacacgacgatcgaccggaagcggtacacgtcgactaaggaagtcctggacgccacgctgatccaccagagcatcacgggcctgtacgagacgcggatcgacctcagccagctgggtggcgacggtggtggcagccccaagaagaagcggaaggtgtag

SEQ ID NO: 46 - RNA, 4140 nt, synthetic construct
  misc_feature 1..4140: note = Synthetic
  source 1..4140: mol_type = other RNA
atggacaagaagtacagcatcggcctcgacatcggcaccaacagcgtcggctgggccgtcatcaccgacgagtacaaggtccccagcaagaagttcaaggtcctcggcaacaccgaccgccacagcatcaagaagaacctcatcggcgccctcctcttcgacagcggcgagaccgccgaggccacccgcctcaagcgcaccgcccgccgccgctacacccgccgcaagaaccgcatctgctacctccaggagatcttcagcaacgagatggccaaggtcgacgacagcttcttccaccgcctcgaggagagcttcctcgtcgaggaggacaagaagcacgagcgccaccccatcttcggcaacatcgtcgacgaggtcgcctaccacgagaagtaccccaccatctaccacctccgcaagaagctcgtcgacagcaccgacaaggccgacctccgcctcatctacctcgccctcgcccacatgatcaagttccgcggccacttcctcatcgagggcgacctcaaccccgacaacagcgacgtcgacaagctcttcatccagctcgtccagacctacaaccagctcttcgaggagaaccccatcaacgccagcggcgtcgacgccaaggccatcctcagcgcccgcctcagcaagagccgccgcctcgagaacctcatcgcccagctccccggcgagaagaagaacggcctcttcggcaacctcatcgccctcagcctcggcctcacccccaacttcaagagcaacttcgacctcgccgaggacgccaagctccagctcagcaaggacacctacgacgacgacctcgacaacctcctcgcccagatcggcgaccagtacgccgacctcttcctcgccgccaagaacctcagcgacgccatcctcctcagcgacatcctccgcgtcaacaccgagatcaccaaggcccccctcagcgccagcatgatcaagcgctacgacgagcaccaccaggacctcaccctcctcaaggccctcgtccgccagcagctccccgagaagtacaaggagatcttcttcgaccagagcaagaacggctacgccggctacatcgacggcggcgccagccaggaggagttctacaagttcatcaagcccatcctcgagaagatggacggcaccgaggagctcctcgtcaagctcaaccgcgaggacctcctccgcaagcagcgcaccttcgacaacggcagcatcccccaccagatccacctcggcgagctccacgccatcctccgccgccaggaggacttctaccccttcctcaaggacaaccgcgagaagatcgagaagatcctcaccttccgcatcccctactacgtcggccccctcgcccgcggcaacagccgcttcgcctggatgacccgcaagagcgaggagaccatcaccccctggaacttcgaggaggtcgtcgacaagggcgccagcgcccagagcttcatcgagcgcatgaccaacttcgacaagaacctccccaacgagaaggtcctccccaagcacagcctcctctacgagtacttcaccgtctacaacgagctcaccaaggtcaagtacgtcaccgagggcatgcgcaagcccgccttcctcagcggcgagcagaagaaggccatcgtcgacctcctcttcaagaccaaccgcaaggtcaccgtcaagcagctcaaggaggactacttcaagaagatcgagtgcttcgacagcgtcgagatcagcggcgtcgaggaccgcttcaacgccagcctcggcacctaccacgacctcctcaagatcatcaaggacaaggacttcctcgacaacgaggagaacgaggacatcctcgaggacatcgtcctcaccctcaccctcttcgaggaccgcgagatgatcgaggagcgcctcaagacctacgcccacctcttcgacgacaaggtcatgaagcagctcaagcgccgccgctacaccggctggggccgcctcagccgcaagctcatcaacggcatccgcgacaagcagagcggcaagaccatcctcgacttcctcaagagcgacggcttcgccaaccgcaacttcatgcagctcatccacgacgacagcctcaccttcaaggaggacatccagaaggcccaggtcagcggccagggcgacagcctccacgagcacatcgccaacctcgccggcagccccgccatcaagaagggcatcctccagaccgtcaaggtcgtcgacgagctcgtcaaggtcatgggccgccacaagcccgagaacatcgtcatcgagatggcccgcgagaaccagaccacccagaagggccagaagaacagccgcgagcgcatgaagcgcatcgaggagggcatcaaggagctcggcagccagatcctcaaggagcaccccgtcgagaacacccagctccagaacgagaagctctacctctactacctccagaacggccgcgacatgtacgtcgaccaggagctcgacatcaaccgcctcagcgactacgacgtcgaccacatcgtcccccagagcttcctcaaggacgacagcatcgacaacaaggtcctcacccgcagcgacaagaaccgcggcaagagcgacaacgtccccagcgaggaggtcgtcaagaagatgaagaactactggcgccagctcctcaacgccaagctcatcacccagcgcaagttcgacaacctcaccaaggccgagcgcggcggcctcagcgagctcgacaaggccggcttcatcaagcgccagctcgtcgagacccgccagatcaccaagcacgtcgcccagatcctcgacagccgcatgaacaccaagtacgacgagaacgacaagctcatccgcgaggtcaaggtcatcaccctcaagagcaagctcgtcagcgacttccgcaaggacttccagttctacaaggtccgcgagatcaacaactaccaccacgcccacgacgcctacctcaacgccgtcgtcggcaccgccctcatcaagaagtaccccaagctcgagagcgagttcgtctacggcgactacaaggtctacgacgtccgcaagatgatcgccaagagcgagcaggagatcggcaaggccaccgccaagtacttcttctacagcaacatcatgaacttcttcaagaccgagatcaccctcgccaacggcgagatccgcaagcgccccctcatcgagaccaacggcgagaccggcgagatcgtctgggacaagggccgcgacttcgccaccgtccgcaaggtcctcagcatgccccaggtcaacatcgtcaagaagaccgaggtccagaccggcggcttcagcaaggagagcatcctccccaagcgcaacagcgacaagctcatcgcccgcaagaaggactgggaccccaagaagtacggcggcttcgacagccccaccgtcgcctacagcgtcctcgtcgtcgccaaggtcgagaagggcaagagcaagaagctcaagagcgtcaaggagctcctcggcatcaccatcatggagcgcagcagcttcgagaagaaccccatcgacttcctcgaggccaagggctacaaggaggtcaagaaggacctcatcatcaagctccccaagtacagcctcttcgagctcgagaacggccgcaagcgcatgctcgccagcgccggcgagctccagaagggcaacgagctcgccctccccagcaagtacgtcaacttcctctacctcgccagccactacgagaagctcaagggcagccccgaggacaacgagcagaagcagctcttcgtcgagcagcacaagcactacctcgacgagatcatcgagcagatcagcgagttcagcaagcgcgtcatcctcgccgacgccaacctcgacaaggtcctcagcgcctacaacaagcaccgcgacaagcccatccgcgagcaggccgagaacatcatccacctcttcaccctcaccaacctcggcgcccccgccgccttcaagtacttcgacaccaccatcgaccgcaagcgctacaccagcaccaaggaggtcctcgacgccaccctcatccaccagagcatcaccggcctctacgagacccgcatcgacctcagccagctcggcggcgacggcggcggcagccccaagaagaagcgcaaggtctag

SEQ ID NO: 47 - DNA, 4140 bp, Streptococcus pyogenes
  source 1..4140: mol_type = genomic DNA
atggacaagaagtacagcatcggcctggacatcggcaccaacagcgtgggctgggccgtgatcaccgacgagtacaaggtgcccagcaagaagttcaaggtgctgggcaacaccgaccggcacagcatcaagaagaacctgatcggcgccctgctgttcgacagcggcgagaccgccgaggccacccggctgaagcggaccgcccggcggcggtacacccggcggaagaaccggatctgctacctgcaggagatcttcagcaacgagatggccaaggtggacgacagcttcttccaccggctggaggagagcttcctggtggaggaggacaagaagcacgagcggcaccccatcttcggcaacatcgtggacgaggtggcctaccacgagaagtaccccaccatctaccacctgcggaagaagctggtggacagcaccgacaaggccgacctgcggctgatctacctggccctggcccacatgatcaagttccggggccacttcctgatcgagggcgacctgaaccccgacaacagcgacgtggacaagctgttcatccagctggtgcagacctacaaccagctgttcgaggagaaccccatcaacgccagcggcgtggacgccaaggccatcctgagcgcccggctgagcaagagccggcggctggagaacctgatcgcccagctgcccggcgagaagaagaacggcctgttcggcaacctgatcgccctgagcctgggcctgacccccaacttcaagagcaacttcgacctggccgaggacgccaagctgcagctgagcaaggacacctacgacgacgacctggacaacctgctggcccagatcggcgaccagtacgccgacctgttcctggccgccaagaacctgagcgacgccatcctgctgagcgacatcctgcgggtgaacaccgagatcaccaaggcccccctgagcgccagcatgatcaagcggtacgacgagcaccaccaggacctgaccctgctgaaggccctggtgcggcagcagctgcccgagaagtacaaggagatcttcttcgaccagagcaagaacggctacgccggctacatcgacggcggcgccagccaggaggagttctacaagttcatcaagcccatcctggagaagatggacggcaccgaggagctgctggtgaagctgaaccgggaggacctgctgcggaagcagcggaccttcgacaacggcagcatcccccaccagatccacctgggcgagctgcacgccatcctgcggcggcaggaggacttctaccccttcctgaaggacaaccgggagaagatcgagaagatcctgaccttccggatcccctactacgtgggccccctggcccggggcaacagccggttcgcctggatgacccggaagagcgaggagaccatcaccccctggaacttcgaggaggtggtggacaagggcgccagcgcccagagcttcatcgagcggatgaccaacttcgacaagaacctgcccaacgagaaggtgctgcccaagcacagcctgctgtacgagtacttcaccgtgtacaacgagctgaccaaggtgaagtacgtgaccgagggcatgcggaagcccgccttcctgagcggcgagcagaagaaggccatcgtggacctgctgttcaagaccaaccggaaggtgaccgtgaagcagctgaaggaggactacttcaagaagatcgagtgcttcgacagcgtggagatcagcggcgtggaggaccggttcaacgccagcctgggcacctaccacgacctgctgaagatcatcaaggacaaggacttcctggacaacgaggagaacgaggacatcctggaggacatcgtgctgaccctgaccctgttcgaggaccgggagatgatcgaggagcggctgaagacctacgcccacctgttcgacgacaaggtgatgaagcagctgaagcggcggcggtacaccggctggggccggctgagccggaagctgatcaacggcatccgggacaagcagagcggcaagaccatcctggacttcctgaagagcgacggcttcgccaaccggaacttcatgcagctgatccacgacgacagcctgaccttcaaggaggacatccagaaggcccaggtgagcggccagggcgacagcctgcacgagcacatcgccaacctggccggcagccccgccatcaagaagggcatcctgcagaccgtgaaggtggtggacgagctggtgaaggtgatgggccggcacaagcccgagaacatcgtgatcgagatggcccgggagaaccagaccacccagaagggccagaagaacagccgggagcggatgaagcggatcgaggagggcatcaaggagctgggcagccagatcctgaaggagcaccccgtggagaacacccagctgcagaacgagaagctgtacctgtactacctgcagaacggccgggacatgtacgtggaccaggagctggacatcaaccggctgagcgactacgacgtggaccacatcgtgccccagagcttcctgaaggacgacagcatcgacaacaaggtgctgacccggagcgacaagaaccggggcaagagcgacaacgtgcccagcgaggaggtggtgaagaagatgaagaactactggcggcagctgctgaacgccaagctgatcacccagcggaagttcgacaacctgaccaaggccgagcggggcggcctgagcgagctggacaaggccggcttcatcaagcggcagctggtggagacccggcagatcaccaagcacgtggcccagatcctggacagccggatgaacaccaagtacgacgagaacgacaagctgatccgggaggtgaaggtgatcaccctgaagagcaagctggtgagcgacttccggaaggacttccagttctacaaggtgcgggagatcaacaactaccaccacgcccacgacgcctacctgaacgccgtggtgggcaccgccctgatcaagaagtaccccaagctggagagcgagttcgtgtacggcgactacaaggtgtacgacgtgcggaagatgatcgccaagagcgagcaggagatcggcaaggccaccgccaagtacttcttctacagcaacatcatgaacttcttcaagaccgagatcaccctggccaacggcgagatccggaagcggcccctgatcgagaccaacggcgagaccggcgagatcgtgtgggacaagggccgggacttcgccaccgtgcggaaggtgctgagcatgccccaggtgaacatcgtgaagaagaccgaggtgcagaccggcggcttcagcaaggagagcatcctgcccaagcggaacagcgacaagctgatcgcccggaagaaggactgggaccccaagaagtacggcggcttcgacagccccaccgtggcctacagcgtgctggtggtggccaaggtggagaagggcaagagcaagaagctgaagagcgtgaaggagctgctgggcatcaccatcatggagcggagcagcttcgagaagaaccccatcgacttcctggaggccaagggctacaaggaggtgaagaaggacctgatcatcaagctgcccaagtacagcctgttcgagctggagaacggccggaagcggatgctggccagcgccggcgagctgcagaagggcaacgagctggccctgcccagcaagtacgtgaacttcctgtacctggccagccactacgagaagctgaagggcagccccgaggacaacgagcagaagcagctgttcgtggagcagcacaagcactacctggacgagatcatcgagcagatcagcgagttcagcaagcgggtgatcctggccgacgccaacctggacaaggtgctgagcgcctacaacaagcaccgggacaagcccatccgggagcaggccgagaacatcatccacctgttcaccctgaccaacctgggcgcccccgccgccttcaagtacttcgacaccaccatcgaccggaagcggtacaccagcaccaaggaggtgctggacgccaccctgatccaccagagcatcaccggcctgtacgagacccggatcgacctgagccagctgggcggcgacggcggcggcagccccaagaagaagcggaaggtgtga

SEQ ID NO: 48 - protein, 1379 aa, Streptococcus pyogenes
MDKKYSIGLDIGTNSVGWAVITDEYKVPSKKFKVLGNTDRHSIKKNLIGALLFDSGETAEATRLKRTARRRYTRRKNRICYLQEIFSNEMAKVDDSFFHRLEESFLVEEDKKHERHPIFGNIVDEVAYHEKYPTIYHLRKKLVDSTDKADLRLIYLALAHMIKFRGHFLIEGDLNPDNSDVDKLFIQLVQTYNQLFEENPINASGVDAKAILSARLSKSRRLENLIAQLPGEKKNGLFGNLIALSLGLTPNFKSNFDLAEDAKLQLSKDTYDDDLDNLLAQIGDQYADLFLAAKNLSDAILLSDILRVNTEITKAPLSASMIKRYDEHHQDLTLLKALVRQQLPEKYKEIFFDQSKNGYAGYIDGGASQEEFYKFIKPILEKMDGTEELLVKLNREDLLRKQRTFDNGSIPHQIHLGELHAILRRQEDFYPFLKDNREKIEKILTFRIPYYVGPLARGNSRFAWMTRKSEETITPWNFEEVVDKGASAQSFIERMTNFDKNLPNEKVLPKHSLLYEYFTVYNELTKVKYVTEGMRKPAFLSGEQKKAIVDLLFKTNRKVTVKQLKEDYFKKIECFDSVEISGVEDRFNASLGTYHDLLKIIKDKDFLDNEENEDILEDIVLTLTLFEDREMIEERLKTYAHLFDDKVMKQLKRRRYTGWGRLSRKLINGIRDKQSGKTILDFLKSDGFANRNFMQLIHDDSLTFKEDIQKAQVSGQGDSLHEHIANLAGSPAIKKGILQTVKVVDELVKVMGRHKPENIVIEMARENQTTQKGQKNSRERMKRIEEGIKELGSQILKEHPVENTQLQNEKLYLYYLQNGRDMYVDQELDINRLSDYDVDHIVPQSFLKDDSIDNKVLTRSDKNRGKSDNVPSEEVVKKMKNYWRQLLNAKLITQRKFDNLTKAERGGLSELDKAGFIKRQLVETRQITKHVAQILDSRMNTKYDENDKLIREVKVITLKSKLVSDFRKDFQFYKVREINNYHHAHDAYLNAVVGTALIKKYPKLESEFVYGDYKVYDVRKMIAKSEQEIGKATAKYFFYSNIMNFFKTEITLANGEIRKRPLIETNGETGEIVWDKGRDFATVRKVLSMPQVNIVKKTEVQTGGFSKESILPKRNSDKLIARKKDWDPKKYGGFDSPTVAYSVLVVAKVEKGKSKKLKSVKELLGITIMERSSFEKNPIDFLEAKGYKEVKKDLIIKLPKYSLFELENGRKRMLASAGELQKGNELALPSKYVNFLYLASHYEKLKGSPEDNEQKQLFVEQHKHYLDEIIEQISEFSKRVILADANLDKVLSAYNKHRDKPIREQAENIIHLFTLTNLGAPAAFKYFDTTIDRKRYTSTKEVLDATLIHQSITGLYETRIDLSQLGGDGGGSPKKKRKV

SEQ ID NO: 49 - RNA, 4197 nt, synthetic construct
  misc_feature 1..4197: note = Synthetic
  source 1..4197: mol_type = other RNA
atggacaagaagtactccatcggcctggacatcggcaccaactccgtgggctgggccgtgatcaccgacgagtacaaggtgccctccaagaagttcaaggtgctgggcaacaccgaccggcactccatcaagaagaacctgatcggcgccctgctgttcgactccggcgagaccgccgaggccacccggctgaagcggaccgcccggcggcggtacacccggcggaagaaccggatctgctacctgcaggagatcttctccaacgagatggccaaggtggacgactccttcttccaccggctggaggagtccttcctggtggaggaggacaagaagcacgagcggcaccccatcttcggcaacatcgtggacgaggtggcctaccacgagaagtaccccaccatctaccacctgcggaagaagctggtggactccaccgacaaggccgacctgcggctgatctacctggccctggcccacatgatcaagttccggggccacttcctgatcgagggcgacctgaaccccgacaactccgacgtggacaagctgttcatccagctggtgcagacctacaaccagctgttcgaggagaaccccatcaacgcctccggcgtggacgccaaggccatcctgtccgcccggctgtccaagtcccggcggctggagaacctgatcgcccagctgcccggcgagaagaagaacggcctgttcggcaacctgatcgccctgtccctgggcctgacccccaacttcaagtccaacttcgacctggccgaggacgccaagctgcagctgtccaaggacacctacgacgacgacctggacaacctgctggcccagatcggcgaccagtacgccgacctgttcctggccgccaagaacctgtccgacgccatcctgctgtccgacatcctgcgggtgaacaccgagatcaccaaggcccccctgtccgcctccatgatcaagcggtacgacgagcaccaccaggacctgaccctgctgaaggccctggtgcggcagcagctgcccgagaagtacaaggagatcttcttcgaccagtccaagaacggctacgccggctacatcgacggcggcgcctcccaggaggagttctacaagttcatcaagcccatcctggagaagatggacggcaccgaggagctgctggtgaagctgaaccgggaggacctgctgcggaagcagcggaccttcgacaacggctccatcccccaccagatccacctgggcgagctgcacgccatcctgcggcggcaggaggacttctaccccttcctgaaggacaaccgggagaagatcgagaagatcctgaccttccggatcccctactacgtgggccccctggcccggggcaactcccggttcgcctggatgacccggaagtccgaggagaccatcaccccctggaacttcgaggaggtggtggacaagggcgcctccgcccagtccttcatcgagcggatgaccaacttcgacaagaacctgcccaacgagaaggtgctgcccaagcactccctgctgtacgagtacttcaccgtgtacaacgagctgaccaaggtgaagtacgtgaccgagggcatgcggaagcccgccttcctgtccggcgagcagaagaaggccatcgtggacctgctgttcaagaccaaccggaaggtgaccgtgaagcagctgaaggaggactacttcaagaagatcgagtgcttcgactccgtggagatctccggcgtggaggaccggttcaacgcctccctgggcacctaccacgacctgctgaagatcatcaaggacaaggacttcctggacaacgaggagaacgaggacatcctggaggacatcgtgctgaccctgaccctgttcgaggaccgggagatgatcgaggagcggctgaagacctacgcccacctgttcgacgacaaggtgatgaagcagctgaagcggcggcggtacaccggctggggccggctgtcccggaagctgatcaacggcatccgggacaagcagtccggcaagaccatcctggacttcctgaagtccgacggcttcgccaaccggaacttcatgcagctgatccacgacgactccctgaccttcaaggaggacatccagaaggcccaggtgtccggccagggcgactccctgcacgagcacatcgccaacctggccggctcccccgccatcaagaagggcatcctgcagaccgtgaaggtggtggacgagctggtgaaggtgatgggccggcacaagcccgagaacatcgtgatcgagatggcccgggagaaccagaccacccagaagggccagaagaactcccgggagcggatgaagcggatcgaggagggcatcaaggagctgggctcccagatcctgaaggagcaccccgtggagaacacccagctgcagaacgagaagctgtacctgtactacctgcagaacggccgggacatgtacgtggaccaggagctggacatcaaccggctgtccgactacgacgtggaccacatcgtgccccagtccttcctgaaggacgactccatcgacaacaaggtgctgacccggtccgacaagaaccggggcaagtccgacaacgtgccctccgaggaggtggtgaagaagatgaagaactactggcggcagctgctgaacgccaagctgatcacccagcggaagttcgacaacctgaccaaggccgagcggggcggcctgtccgagctggacaaggccggcttcatcaagcggcagctggtggagacccggcagatcaccaagcacgtggcccagatcctggactcccggatgaacaccaagtacgacgagaacgacaagctgatccgggaggtgaaggtgatcaccctgaagtccaagctggtgtccgacttccggaaggacttccagttctacaaggtgcgggagatcaacaactaccaccacgcccacgacgcctacctgaacgccgtggtgggcaccgccctgatcaagaagtaccccaagctggagtccgagttcgtgtacggcgactacaaggtgtacgacgtgcggaagatgatcgccaagtccgagcaggagatcggcaaggccaccgccaagtacttcttctactccaacatcatgaacttcttcaagaccgagatcaccctggccaacggcgagatccggaagcggcccctgatcgagaccaacggcgagaccggcgagatcgtgtgggacaagggccgggacttcgccaccgtgcggaaggtgctgtccatgccccaggtgaacatcgtgaagaagaccgaggtgcagaccggcggcttctccaaggagtccatcctgcccaagcggaactccgacaagctgatcgcccggaagaaggactgggaccccaagaagtacggcggcttcgactcccccaccgtggcctactccgtgctggtggtggccaaggtggagaagggcaagtccaagaagctgaagtccgtgaaggagctgctgggcatcaccatcatggagcggtcctccttcgagaagaaccccatcgacttcctggaggccaagggctacaaggaggtgaagaaggacctgatcatcaagctgcccaagtactccctgttcgagctggagaacggccggaagcggatgctggcctccgccggcgagctgcagaagggcaacgagctggccctgccctccaagtacgtgaacttcctgtacctggcctcccactacgagaagctgaagggctcccccgaggacaacgagcagaagcagctgttcgtggagcagcacaagcactacctggacgagatcatcgagcagatctccgagttctccaagcgggtgatcctggccgacgccaacctggacaaggtgctgtccgcctacaacaagcaccgggacaagcccatccgggagcaggccgagaacatcatccacctgttcaccctgaccaacctgggcgcccccgccgccttcaagtacttcgacaccaccatcgaccggaagcggtacacctccaccaaggaggtgctggacgccaccctgatccaccagtccatcaccggcctgtacgagacccggatcgacctgtcccagctgggcggcgacggcggcggctcccccaagaagaagcggaaggtgtccgagtccgccacccccgagtccgtgtccggctggcggctgttcaagaagatctcctga

SEQ ID NO: 50 - protein, 1398 aa, synthetic construct
  REGION 1..1398: note = Synthetic
MDKKYSIGLDIGTNSVGWAVITDEYKVPSKKFKVLGNTDRHSIKKNLIGALLFDSGETAEATRLKRTARRRYTRRKNRICYLQEIFSNEMAKVDDSFFHRLEESFLVEEDKKHERHPIFGNIVDEVAYHEKYPTIYHLRKKLVDSTDKADLRLIYLALAHMIKFRGHFLIEGDLNPDNSDVDKLFIQLVQTYNQLFEENPINASGVDAKAILSARLSKSRRLENLIAQLPGEKKNGLFGNLIALSLGLTPNFKSNFDLAEDAKLQLSKDTYDDDLDNLLAQIGDQYADLFLAAKNLSDAILLSDILRVNTEITKAPLSASMIKRYDEHHQDLTLLKALVRQQLPEKYKEIFFDQSKNGYAGYIDGGASQEEFYKFIKPILEKMDGTEELLVKLNREDLLRKQRTFDNGSIPHQIHLGELHAILRRQEDFYPFLKDNREKIEKILTFRIPYYVGPLARGNSRFAWMTRKSEETITPWNFEEVVDKGASAQSFIERMTNFDKNLPNEKVLPKHSLLYEYFTVYNELTKVKYVTEGMRKPAFLSGEQKKAIVDLLFKTNRKVTVKQLKEDYFKKIECFDSVEISGVEDRFNASLGTYHDLLKIIKDKDFLDNEENEDILEDIVLTLTLFEDREMIEERLKTYAHLFDDKVMKQLKRRRYTGWGRLSRKLINGIRDKQSGKTILDFLKSDGFANRNFMQLIHDDSLTFKEDIQKAQVSGQGDSLHEHIANLAGSPAIKKGILQTVKVVDELVKVMGRHKPENIVIEMARENQTTQKGQKNSRERMKRIEEGIKELGSQILKEHPVENTQLQNEKLYLYYLQNGRDMYVDQELDINRLSDYDVDHIVPQSFLKDDSIDNKVLTRSDKNRGKSDNVPSEEVVKKMKNYWRQLLNAKLITQRKFDNLTKAERGGLSELDKAGFIKRQLVETRQITKHVAQILDSRMNTKYDENDKLIREVKVITLKSKLVSDFRKDFQFYKVREINNYHHAHDAYLNAVVGTALIKKYPKLESEFVYGDYKVYDVRKMIAKSEQEIGKATAKYFFYSNIMNFFKTEITLANGEIRKRPLIETNGETGEIVWDKGRDFATVRKVLSMPQVNIVKKTEVQTGGFSKESILPKRNSDKLIARKKDWDPKKYGGFDSPTVAYSVLVVAKVEKGKSKKLKSVKELLGITIMERSSFEKNPIDFLEAKGYKEVKKDLIIKLPKYSLFELENGRKRMLASAGELQKGNELALPSKYVNFLYLASHYEKLKGSPEDNEQKQLFVEQHKHYLDEIIEQISEFSKRVILADANLDKVLSAYNKHRDKPIREQAENIIHLFTLTNLGAPAAFKYFDTTIDRKRYTSTKEVLDATLIHQSITGLYETRIDLSQLGGDGGGSPKKKRKVSESATPESVSGWRLFKKIS

SEQ ID NO: 51-57 - skipped (7 entries)

SEQ ID NO: 58 - protein, 16 aa, synthetic construct
  REGION 1..16: note = Synthetic
SGSETPGTSESATPES

SEQ ID NO: 59 - protein, 12 aa, synthetic construct
  REGION 1..12: note = Synthetic
SGSETPGTSESA

SEQ ID NO: 60 - protein, 21 aa, synthetic construct
  REGION 1..21: note = Synthetic
SGSETPGTSESATPEGGSGGS

SEQ ID NO: 61 - skipped

SEQ ID NO: 62 - protein, 5 aa, synthetic construct
  REGION 1..5: note = Synthetic
GGGGS

SEQ ID NO: 63 - protein, 5 aa, synthetic construct
  REGION 1..5: note = Synthetic
EAAAK

SEQ ID NO: 64 - protein, 5 aa, synthetic construct
  REGION 1..5: note = Synthetic
SEGSA

SEQ ID NO: 65 - protein, 9 aa, synthetic construct
  REGION 1..9: note = Synthetic
SEGSAGTST

SEQ ID NO: 66 - protein, 10 aa, synthetic construct
  REGION 1..10: note = Synthetic
GGGGSGGGGS

SEQ ID NO: 67 - protein, 10 aa, synthetic construct
  REGION 1..10: note = Synthetic
GGGGSEAAAK

SEQ ID NO: 68 - protein, 10 aa, synthetic construct
  REGION 1..10: note = Synthetic
EAAAKGGGGS

SEQ ID NO: 69 - protein, 10 aa, synthetic construct
  REGION 1..10: note = Synthetic
EAAAKEAAAK

SEQ ID NO: 70 - protein, 15 aa, synthetic construct
  REGION 1..15: note = Synthetic
SEGSAGTSTESEGSA

SEQ ID NO: 71 - protein, 15 aa, synthetic construct
  REGION 1..15: note = Synthetic
GGGGSGGGGSGGGGS

SEQ ID NO: 72 - protein, 15 aa, synthetic construct
  REGION 1..15: note = Synthetic
GGGGSGGGGSEAAAK

SEQ ID NO: 73 - protein, 15 aa, synthetic construct
  REGION 1..15: note = Synthetic
GGGGSEAAAKGGGGS

SEQ ID NO: 74 - protein, 15 aa, synthetic construct
  REGION 1..15: note = Synthetic
EAAAKGGGGSEAAAK

SEQ ID NO: 75 - protein, 15 aa, synthetic construct
  REGION 1..15: note = Synthetic
EAAAKEAAAKGGGGS

SEQ ID NO: 76 - protein, 20 aa, synthetic construct
  REGION 1..20: note = Synthetic
SEGSAGTSTESEGSAGTSTE

SEQ ID NO: 77 - protein, 20 aa, synthetic construct
  REGION 1..20: note = Synthetic
GGGGSGGGGSGGGGSEAAAK

SEQ ID NO: 78 - protein, 20 aa, synthetic construct
  REGION 1..20: note = Synthetic
GGGGSGGGGSEAAAKGGGGS

SEQ ID NO: 79 - protein, 20 aa, synthetic construct
  REGION 1..20: note = Synthetic
GGGGSEAAAKGGGGSEAAAK

SEQ ID NO: 80 - protein, 20 aa, synthetic construct
  REGION 1..20: note = Synthetic
GGGGSEAAAKEAAAKGGGGS

SEQ ID NO: 81 - protein, 20 aa, synthetic construct
  REGION 1..20: note = Synthetic
GGGGSEAAAKEAAAKEAAAK

SEQ ID NO: 82 - protein, 20 aa, synthetic construct
  REGION 1..20: note = Synthetic
EAAAKGGGGSGGGGSGGGGS

SEQ ID NO: 83 - protein, 20 aa, synthetic construct
  REGION 1..20: note = Synthetic
EAAAKGGGGSGGGGSEAAAK

SEQ ID NO: 84 - protein, 20 aa, synthetic construct
  REGION 1..20: note = Synthetic
EAAAKGGGGSEAAAKGGGGS

SEQ ID NO: 85 - protein, 20 aa, synthetic construct
  REGION 1..20: note = Synthetic
EAAAKGGGGSEAAAKEAAAK

SEQ ID NO: 86 - protein, 20 aa, synthetic construct
  REGION 1..20: note = Synthetic
EAAAKEAAAKGGGGSGGGGS

SEQ ID NO: 87 - protein, 20 aa, synthetic construct
  REGION 1..20: note = Synthetic
EAAAKEAAAKGGGGSEAAAK

SEQ ID NO: 88 - protein, 20 aa, synthetic construct
  REGION 1..20: note = Synthetic
EAAAKEAAAKEAAAKGGGGS

SEQ ID NO: 89 - protein, 25 aa, synthetic construct
  REGION 1..25: note = Synthetic
SEGSAGTSTESEGSAGTSTESEGSA

SEQ ID NO: 90 - protein, 25 aa, synthetic construct
  REGION 1..25: note = Synthetic
GGGGSGGGGSGGGGSGGGGSGGGGS

SEQ ID NO: 91 - protein, 25 aa, synthetic construct
  REGION 1..25: note = Synthetic
GGGGSGGGGSGGGGSGGGGSEAAAK

SEQ ID NO: 92 - protein, 25 aa, synthetic construct
  REGION 1..25: note = Synthetic
GGGGSGGGGSGGGGSEAAAKGGGGS

SEQ ID NO: 93 - protein, 25 aa, synthetic construct
  REGION 1..25: note = Synthetic
GGGGSGGGGSGGGGSEAAAKEAAAK

SEQ ID NO: 94 - protein, 25 aa, synthetic construct
  REGION 1..25: note = Synthetic
GGGGSGGGGSEAAAKGGGGSGGGGS

SEQ ID NO: 95 - protein, 25 aa, synthetic construct
  REGION 1..25: note = Synthetic
GGGGSGGGGSEAAAKGGGGSEAAAK

SEQ ID NO: 96 - protein, 25 aa, synthetic construct
  REGION 1..25: note = Synthetic
GGGGSGGGGSEAAAKEAAAKGGGGS

SEQ ID NO: 97 - protein, 25 aa, synthetic construct
  REGION 1..25: note = Synthetic
GGGGSGGGGSEAAAKEAAAKEAAAK

SEQ ID NO: 98 - protein, 25 aa, synthetic construct
  REGION 1..25: note = Synthetic
GGGGSEAAAKGGGGSGGGGSGGGGS

SEQ ID NO: 99 - protein, 25 aa, synthetic construct
  REGION 1..25: note = Synthetic
GGGGSEAAAKGGGGSGGGGSEAAAK

SEQ ID NO: 100 - protein, 25 aa, synthetic construct
  REGION 1..25: note = Synthetic
GGGGSEAAAKGGGGSEAAAKGGGGS

SEQ ID NO: 101 - protein, 25 aa, synthetic construct
  REGION 1..25: note = Synthetic
GGGGSEAAAKGGGGSEAAAKEAAAK

SEQ ID NO: 102 - protein, 25 aa, synthetic construct
  REGION 1..25: note = Synthetic
GGGGSEAAAKEAAAKGGGGSGGGGS

SEQ ID NO: 103 - protein, 25 aa, synthetic construct
  REGION 1..25: note = Synthetic
GGGGSEAAAKEAAAKEAAAKGGGGS

SEQ ID NO: 104 - protein, 25 aa, synthetic construct
  REGION 1..25: note = Synthetic
GGGGSEAAAKEAAAKEAAAKEAAAK

SEQ ID NO: 105 - protein, 25 aa, synthetic construct
  REGION 1..25: note = Synthetic
EAAAKGGGGSGGGGSGGGGSGGGGS

SEQ ID NO: 106 - protein, 25 aa, synthetic construct
  REGION 1..25: note = Synthetic
EAAAKGGGGSGGGGSGGGGSEAAAK

SEQ ID NO: 107 - protein, 25 aa, synthetic construct
  REGION 1..25: note = Synthetic
EAAAKGGGGSGGGGSEAAAKGGGGS

SEQ ID NO: 108 - protein, 25 aa, synthetic construct
  REGION 1..25: note = Synthetic
EAAAKGGGGSGGGGSEAAAKEAAAK

SEQ ID NO: 109 - protein, 25 aa, synthetic construct
  REGION 1..25: note = Synthetic
EAAAKGGGGSEAAAKGGGGSGGGGS

SEQ ID NO: 110 - protein, 25 aa, synthetic construct
  REGION 1..25: note = Synthetic
EAAAKGGGGSEAAAKGGGGSEAAAK

SEQ ID NO: 111 - protein, 25 aa, synthetic construct
  REGION 1..25: note = Synthetic
EAAAKGGGGSEAAAKEAAAKGGGGS

SEQ ID NO: 112 - protein, 25 aa, synthetic construct
  REGION 1..25: note = Synthetic
EAAAKGGGGSEAAAKEAAAKEAAAK

SEQ ID NO: 113 - protein, 25 aa, synthetic construct
  REGION 1..25: note = Synthetic
EAAAKEAAAKGGGGSEAAAKGGGGS

SEQ ID NO: 114 - protein, 25 aa, synthetic construct
  REGION 1..25: note = Synthetic
EAAAKEAAAKGGGGSEAAAKEAAAK

SEQ ID NO: 115 - protein, 25 aa, synthetic construct
  REGION 1..25: note = Synthetic
EAAAKEAAAKEAAAKGGGGSEAAAK

SEQ ID NO: 116 - protein, 25 aa, synthetic construct
  REGION 1..25: note = Synthetic
EAAAKEAAAKEAAAKEAAAKGGGGS

SEQ ID NO: 117 - protein, 25 aa, synthetic construct
  REGION 1..25: note = Synthetic
EAAAKEAAAKEAAAKEAAAKEAAAK

SEQ ID NO: 118 - protein, 16 aa, synthetic construct
  REGION 1..16: note = Synthetic
GTKDSTKDIPETPSKD

SEQ ID NO: 119 - protein, 16 aa, synthetic construct
  REGION 1..16: note = Synthetic
GRDVRQPEVKEEKPES

SEQ ID NO: 120 - protein, 16 aa, synthetic construct
  REGION 1..16: note = Synthetic
EGKSSGSGSESKSTAG

SEQ ID NO: 121 - protein, 16 aa, synthetic construct
  REGION 1..16: note = Synthetic
TPGSPAGSPTSTEEGT

SEQ ID NO: 122 - protein, 16 aa, synthetic construct
  REGION 1..16: note = Synthetic
GSEPATSGSETPGTST

SEQ ID NO: 123-129 - skipped (7 entries)

SEQ ID NO: 130 - RNA, 100 nt, synthetic construct
  misc_feature 1..100: note = Synthetic
  misc_feature 1..100: note = See specification as filed for detailed description of substitutions and modifications
  source 1..100: mol_type = other RNA
acacaaataccagtccagcggttttagagctagaaatagcaagttaaaataaggctagtccgttatcaacttgaaaaagtggcaccgagtcggtgctttt

SEQ ID NO: 131 - RNA, 111 nt, synthetic construct
  misc_feature 1..111: note = Synthetic
  misc_feature 1..111: note = See specification as filed for detailed description of substitutions and modifications
  source 1..111: mol_type = other RNA
ggcctggctgatgaggccgcacatgttgtagctccctgaaaccgttgctacaataaggccgtctgaaaagatgtgccgcaacgctctgccgcttctgcggcatcgtttatc

SEQ ID NO: 132 - RNA, 107 nt, synthetic construct
  misc_feature 1..107: note = Synthetic
  misc_feature 1..107: note = See specification as filed for detailed description of substitutions and modifications
  source 1..107: mol_type = other RNA
ggcctggctgatgaggccgcacatgttgtagctccctgaaaccgttgctacaataaggccgtctgaaaagatgtgccgcaacgctctgccttctggcatcgtttatc

SEQ ID NO: 133 - RNA, 105 nt, synthetic construct
  misc_feature 1..105: note = Synthetic
  misc_feature 1..105: note = See specification as filed for detailed description of substitutions and modifications
  source 1..105: mol_type = other RNA
ggcctggctgatgaggccgcacatgttgtagctccctgaaaccgttgctacaataaggccgtcgaaagatgtgccgcaacgctctgccttctggcatcgtttatc

SEQ ID NO: 134 - RNA, 105 nt, synthetic construct
  misc_feature 1..105: note = Synthetic
  misc_feature 1..105: note = See specification as filed for detailed description of substitutions and modifications
  source 1..105: mol_type = other RNA
gtgtgtccctctccccacccgtccgttgtagctccctgaaaccgttgctacaataaggccgtcgaaagatgtgccgcaacgctctgccttctggcatcgtttatt

SEQ ID NO: 135 - RNA, 107 nt, synthetic construct
  misc_feature 1..107: note = Synthetic
  misc_feature 1..107: note = See specification as filed for detailed description of substitutions and modifications
  source 1..107: mol_type = other RNA
ggcctggctgatgaggccgcacatgttgtagctccctcgaaagccgttgctacaataaggccgtcgaaagatgtgccgcaacgctctgccttctggcatcgtttatt

SEQ ID NO: 136 - RNA, 107 nt, synthetic construct
  misc_feature 1..107: note = Synthetic
  misc_feature 1..107: note = See specification as filed for detailed description of substitutions and modifications
  source 1..107: mol_type = other RNA
tgaggaccgccctgggcctgggaggttgtagctccctcgaaagccgttgctacaataaggccgtcgaaagatgtgccgcaacgctctgccttctggcatcgtttatt

SEQ ID NO: 137 - RNA, 101 nt, synthetic construct
  misc_feature 1..101: note = Synthetic
  misc_feature 1..101: note = See specification as filed for detailed description of substitutions and modifications
  source 1..101: mol_type = other RNA
ccaagtgtcttccagtacgatttggttgtagctccctgaaaccgttgctacaataaggccgtcgaaagatgtgccgcaacgctctgccttctggcatcgtt

SEQ ID NO: 138 - RNA, 101 nt, synthetic construct
  misc_feature 1..101: note = Synthetic
  misc_feature 1..101: note = See specification as filed for detailed description of substitutions and modifications
  source 1..101: mol_type = other RNA
cttcaccaggagaagccgtcacacgttgtagctccctgaaaccgttgctacaataaggccgtcgaaagatgtgccgcaacgctctgccttctggcatcgtt

SEQ ID NO: 139 - RNA, 101 nt, synthetic construct; identical to SEQ ID NO: 137
  misc_feature 1..101: note = Synthetic
  misc_feature 1..101: note = See specification as filed for detailed description of substitutions and modifications
  source 1..101: mol_type = other RNA

SEQ ID NO: 140 - skipped

SEQ ID NO: 141 - RNA, 93 nt, synthetic construct
  misc_feature 1..93: note = Synthetic
  misc_feature 1..93: note = See specification as filed for detailed description of substitutions and modifications
  source 1..93: mol_type = other RNA
ccaagtgtcttccagtacgatttggttgtagctcccttcgaccgttgctacaataaggccgtcgatgtgccgcaacgctctgccggcatcgtt

SEQ ID NO: 142 - RNA, 101 nt, synthetic construct; identical to SEQ ID NO: 138
  misc_feature 1..101: note = Synthetic
  misc_feature 1..101: note = See specification as filed for detailed description of substitutions and modifications
  source 1..101: mol_type = other RNA

SEQ ID NO: 143 - RNA, 93 nt, synthetic construct
  misc_feature 1..93: note = Synthetic
  misc_feature 1..93: note = See specification as filed for detailed description of substitutions and modifications
  source 1..93: mol_type = other RNA
cttcaccaggagaagccgtcacacgttgtagctcccttcgaccgttgctacaataaggccgtcgatgtgccgcaacgctctgccggcatcgtt

SEQ ID NO: 144 - RNA, 93 nt, synthetic construct
  misc_feature 1..93: note = Synthetic
  misc_feature 1..93: note = See specification as filed for detailed description of substitutions and modifications
  source 1..93: mol_type = other RNA
ccaagtgtcttccagtacgatttggttgtagctcccttgcaccgttgctacaataaggccgtcgatgtgccgcaacgctctgccggcatcgtt

SEQ ID NO: 145 - RNA, 91 nt, synthetic construct
  misc_feature 1..91: note = Synthetic
  misc_feature 1..91: note = See specification as filed for detailed description of substitutions and modifications
  source 1..91: mol_type = other RNA
ccaagtgtcttccagtacgatttggttgtagctccctgcccgttgctacaataaggccgtcgatgtgccgcaacgctctgccggcatcgtt

SEQ ID NO: 146 - RNA, 89 nt, synthetic construct
  misc_feature 1..89: note = Synthetic
  misc_feature 1..89: note = See specification as filed for detailed description of substitutions and modifications
  source 1..89: mol_type = other RNA
ccaagtgtcttccagtacgatttggttgtagctcccgccgttgctacaataaggccgtcgatgtgccgcaacgctctgccggcatcgtt

SEQ ID NO: 147 - RNA, 87 nt, synthetic construct
  misc_feature 1..87: note = Synthetic
  misc_feature 1..87: note = See specification as filed for detailed description of substitutions and modifications
  source 1..87: mol_type = other RNA
ccaagtgtcttccagtacgatttggttgtagctccgcgttgctacaataaggccgtcgatgtgccgcaacgctctgccggcatcgtt

SEQ ID NO: 148 - RNA, 85 nt, synthetic construct
  misc_feature 1..85: note = Synthetic
  misc_feature 1..85: note = See specification as filed for detailed description of substitutions and modifications
  source 1..85: mol_type = other RNA
ccaagtgtcttccagtacgatttggttgtagctccgttgctacaataaggccgtcgatgtgccgcaacgctctgccggcatcgtt

SEQ ID NO: 149 - RNA, 95 nt, synthetic construct
  misc_feature 1..95: note = Synthetic
  misc_feature 1..95: note = See specification as filed for detailed description of substitutions and modifications
  source 1..95: mol_type = other RNA
ccaagtgtcttccagtacgatttggttgtagctcccttgcaccgttgctacaataaggccgtctagatgtgccgcaacgctctgccggcatcgtt

SEQ ID NO: 150 - RNA, 95 nt, synthetic construct
  misc_feature 1..95: note = Synthetic
  misc_feature 1..95: note = See specification as filed for detailed description of substitutions and modifications
  source 1..95: mol_type = other RNA
ccaagtgtcttccagtacgatttggttgtagctcccttgcaccgttgctacaataaggccgtcgatgtgccgcaacgctctgcctaggcatcgtt

SEQ ID NO: 151 - protein, 199 aa, synthetic construct
  REGION 1..199: note = Synthetic
MEASPASGPRHLMDPHIFTSNFNNGIGRHKTYLCYEVERLDNGTSVKMDQHRGFLHNQAKNLLCGFYGRHAELRFLDLVPSLQLDPAQIYRVTWFISWSPCFSWGCAGEVRAFLQENTHVRLRIFAARIYDYDPLYKEALQMLRDAGAQVSIMTYDEFKHCWDTFVDHQGCPFQPWDGLDEHSQALSGRLRAILQNQGN

SEQ ID NO: 152 - protein, 229 aa, synthetic construct [sequence omitted]

SEQ ID NO: 153 - protein, 113 aa, synthetic construct
  REGION 1..113: note = Synthetic
MSSETGPVAVDPTLRRRIEPHEFEVFFDPRELRKETCLLYEINWGGRHSVWRHTSQNTSNHVEVNFLEKFTTERYFRPNTRCSITWFLSWSPCGECSRAITEFLSRHPYVTLF

SEQ ID NO: 154 - protein, 121 aa, synthetic construct
  REGION 1..121: note = Synthetic
MSSETGPVAVDPTLRRRIEPHEFEVFFDPRELRKETCLLYEINWGGRHSVWRHTSQNTSNHVEVNFLEKFTTERYFRPNTRCSITWFLSWSPCGECSRAITEFLSRHPYVTLFIYIARLYH

SEQ ID NO: 155 - protein, 128 aa, synthetic construct
  REGION 1..128: note = Synthetic
MNWNALRSKAIEVSRHAYAPYSGFPVGAAALVDDGRTVTGCNVENVSYGLGLCAECAVVCALHSGGGGRLVALSCVGPDGGVLMPCGRCRQVLLEHGGPELLIDHAHGPRPLRELLPDAFGPDDLGRR

SEQ ID NO: 156 - protein, 130 aa, synthetic construct
  REGION 1..130: note = Synthetic
MTHHALIEAAKAAREKAYAPYSNFKVGAALVTNDGKVFHGCNVENASYGLCNCAERTALFSALAAGYRPGEFAAIAVVGETHGPIAPCGACRQVMIELGKPTLEVVLTNMQGDVRVTSAGDLLPDAFYLA

SEQ ID NO: 157 - protein, 132 aa, synthetic construct
  REGION 1..132: note = Synthetic
MPDIDWKQLRDKATQVAAGAYAPYSRFPVGAAALVDDGRVVTGCNVENVSYGLALCAECGVVCALHATGGGRLVALACVDGRGAPLMPCGRCRQLLFEHGGPELLVDHLAGPRRLGDLLPEPFHADLTGEPT

SEQ ID NO: 158 - protein, 132 aa, synthetic construct
  REGION 1..132: note = Synthetic
MNSKQLIQEAIEARKQAYVPYSKFQVGAALLTQDGKVYRGCNVENASYGLCNCAERTALFKAVSEGDKEFVAIAIVADTKRPVPPCGACRQVMVELCKQDTKVYLSNLHGDVQETTVGELLPGAFLAEDLHE

SEQ ID NO: 159 - protein, 133 aa, synthetic construct
  REGION 1..133: note = Synthetic
MPDVDWNMLRGNATQAAAGAYVPYSRFAVGAAALVDDGRVVTGCNVENVSYGLTLCAECAVVCALHSTGGGRLLALACVDGHGSVLMPCGRCRQVLLEHGGSELLIDHPVRPRRLGDLLPDAFGLDDLPRERR

SEQ ID NO: 160 - protein, 134 aa, synthetic construct
  REGION 1..134: note = Synthetic
MGDVNWDTLQKAAVAARANSYAPYSNFPVGVAGFVNDGRLITGVNVENASYGLALCAECSMISALYATGGGRLVAVYCVDGNGDSLMPCGRCRQLLYEHGGPELKIMTPKGVQTMAQLLPQAFNPQERIFGNDE

SEQ ID NO: 161 - protein, 136 aa, synthetic construct
  REGION 1..136: note = Synthetic
MNRQELITEALKARDMAYAPYSKFQVGAALLTKDGKVYRGCNIENAAYSMCNCAERTALFKAVSEGDTEFQMLAVAADTPGPVSPCGACRQVISELCTKDVIVVLTNLQGQIKEMTVEELLPGAFSSEDLHDERKL

SEQ ID NO: 162 - protein, 142 aa, synthetic construct
  REGION 1..142: note = Synthetic
MKVGGIEDRQLEALKRAALKACELSYSPYSHFRVGCSILTNNDVIFTGANVENASYSNCICAERSAMIQVLMAGHRSGWKCMVICGDSEDQCVSPCGVCRQFINEFVVKDFPIVMLNSTGSRSKVMTMGELLPMAFGPSHLN

SEQ ID NO: 163 - protein, 142 aa, synthetic construct
  REGION 1..142: note = Synthetic
MNIEQQLYDVVKQLIEQRYPNDWGGAAAIRVEDGTIYTSVAPDVINASTELCMETGAILEAHKFQKKVTHSICLARENEHSELKVLSPCGVCQERLFYWGPEVQCAITNAKQDIIFKPLKELQPYHWTEAYHDEMVKEWSTR

SEQ ID NO: 164 - protein, 146 aa, synthetic construct
  REGION 1..146: note = Synthetic
MAQERPSCAVEPEHVQRLLLSSREAKKSAYCPYSRFPVGAALLTGDGRIFSGCNIENACYPLGVCAERTAIQKAISEGYKDFRAIAISSDLQEEFISPCGACRQVMREFGTDWAVYMTKPDGTFVVRTVQELLPASFGPEDLQKIQ

SEQ ID NO: 165 - protein, 146 aa, synthetic construct [sequence omitted]

SEQ ID NO: 166 - protein, 158 aa, synthetic construct
  REGION 1..158: note = Synthetic
MVTGGMASKWDQKGMDIAYEEAALGYKEGGVPIGGCLINNKDGSVLGRGHNMRFQKGSATLHGEISTLENCGRLEGKVYKDTTLYTTLSPCDMCTGAIIMYGIPRCVVGENVNFKSKGEKYLQTRGHEVVVVDDERCKKIMKQFIDERPQDWFEDIGE

SEQ ID NO: 167 - protein, 158 aa, synthetic construct
  REGION 1..158: note = Synthetic
MTTTKANLTEFEQQLVDKAIGAMENAYCKYSNFKVGAALVCDDGEIIIGANHENASYGATICAERSAIVTALTKGHRKFKYIVVATELEAPCSPCGVCRQVLIEFGDYKVILGSSTSDQIIETTTYELLPYAFTPKSLDDHEKETEERKHHNDHNNKE

SEQ ID NO: 168 - protein, 166 aa, synthetic construct
  REGION 1..166: note = Synthetic
MAANSLPQDISDVELVHLARAAMKRAHCPYSKFPVGAALLTESGEIVQGCNVENASYGGTICAERSAIVSAVSQGYTKFRAIAVVTELSEPASPCGLCRQFLVEFGDYKVVVGTASNNKILITSTRALLPFAFTPESLDTFEQEKASEAKGLKQDDATEHNVTVVS

SEQ ID NO: 169 - protein, 190 aa, synthetic construct
  REGION 1..190: note = Synthetic
MNPQIRNPMKAMYPGTFYFQFKNLWEANDRNETWLCFTVEGIKRRSVVSWKTGVFRNQVDSETHCHAERCFLSWFCDDILSPNTKYQVTWYTSWSPCPDCAGEVAEFLARHSNVNLTIFTARLYYFQYPCYQEGLRSLSQEGVAVEIMDYEDFKYCWENFVYNDNEPFKPWKGLKTNFRLLKRRLRESLQ

SEQ ID NO: 170 - protein, 190 aa, synthetic construct
  REGION 1..190: note = Synthetic
MNPQIRNPMEAMYPHIFYFHFKNLLKACGRNESWLCFTMEVTKHHSAVFRKRGVFRNQVDPETHCHAERCFLSWFCDDILSPNTNYEVTWYTSWSPCPECAGEVAEFLARHSNVNLTIFTARLCYFWDTDYQEGLCSLSQEGASVKIMGYKDFVSCWKNFVYSDDEPFKPWKGLQTNFRLLKRRLREILQ

SEQ ID NO: 171 - protein, 193 aa, synthetic construct
  REGION 1..193: note = Synthetic
MNDALHIGLPPFLVQANNEPRVLAAPEARMGYVLELVRANIAADGGPFAAAVFERDSGLLIAAGTNRVVPGRCSAAHAEILALSLAQAKLDTHDLSADGLPACELVTSAEPCVMCFGAVIWSGVRSLVCAARSDDVEAIGFDEGPRPENWMGGLEARGITVTTGLLRDAACALLREYNACNGVIYNARCGVHK

SEQ ID NO: 172 - protein, 198 aa, synthetic construct [sequence omitted]

SEQ ID NO: 173 - protein, 198 aa, synthetic construct
  REGION 1..198: note = Synthetic
MDSLLMKQKKFLYHFKNVRWAKGRHETYLCYVVKRRDSATSCSLDFGHLRNKSGCHVELLFLRYISDWDLDPGRCYRVTWFTSWSPCYDCARHVAEFLRWNPNLSLRIFTARLYFCEDRKAEPEGLRRLHRAGVQIGIMTFKDYFYCWNTFVENRERTFKAWEGLHENSVRLTRQLRRILLPLYEVDDLRDAFRMLGF

SEQ ID NO: 174 - protein, 200 aa, synthetic construct
  REGION 1..200: note = Synthetic
MALLTAETFRLQFNNKRRLRRPYYPRKALLCYQLTPQNGSTPTRGYFENKKKCHAEICFINEIKSMGLDETQCYQVTCYLTWSPCSSCAWELVDFIKAHDHLNLGIFASRLYYHWCKPQQKGLRLLCGSQVPVEVMGFPKFADCWENFVDHEKPLSFNPYKMLEELDKNSRAIKRRLERIKIPGVRAQGRYMDILCDAEV

SEQ ID NO: 175 - protein, 224 aa, synthetic construct
  REGION 1..224: note = Synthetic
MAQKEEAAVATEAASQNGEDLENLDDPEKLKELIELPPFEIVTGERLPANFFKFQFRNVEYSSGRNKTFLCYVVEAQGKGGQVQASRGYLEDEHAAAHAEEAFFNTILPAFDPALRYNVTWYVSSSPCAACADRIIKTLSKTKNLRLLILVGRLFMWEEPEIQAALKKLKEAGCKLRIMKPQDFEYVWQNFVEQEEGESKAFQPWEDIQENFLYYEEKLADILK

SEQ ID NO: 176 - protein, 224 aa, synthetic construct
  REGION 1..224: note = Synthetic
MAQKEEAAEAAAPASQNGDDLENLEDPEKLKELIDLPPFEIVTGVRLPVNFFKFQFRNVEYSSGRNKTFLCYVVEVQSKGGQAQATQGYLEDEHAGAHAEEAFFNTILPAFDPALKYNVTWYVSSSPCAACADRILKTLSKTKNLRLLILVSRLFMWEEPEVQAALKKLKEAGCKLRIMKPQDFEYIWQNFVEQEEGESKAFEPWEDIQENFLYYEEKLADILK

SEQ ID NO: 177 - protein, 229 aa, synthetic construct
  REGION 1..229: note = Synthetic
MSSETGPVAVDPTLRRRIEPHEFEVFFDPRELRKETCLLYEINWGGRHSVWRHTSQNTSNHVEVNFLEKFTTERYFRPNTRCSITWFLSWSPCGECSRAITEFLSRHPYVTLFIYIARLYHHTDQRNRQGLRDLISSGVTIQIMTEQEYCYCWRNFVNYPPSNEAYWPRYPHLWVKLYVLELYCIILGLPPCLKILRRKQPQLTFFTITLQTCHYQRIPPHLLWATGLK

SEQ ID NO: 178 - protein, 235 aa, synthetic construct
  REGION 1..235: note = Synthetic
MNSKTGPSVGDATLRRRIKPWEFVAFFNPQELRKETCLLYEIKWGNQNIWRHSNQNTSQHAEINFMEKFTAERHFNSSVRCSITWFLSWSPCWECSKAIRKFLDHYPNVTLAIFISRLYWHMDQQHRQGLKELVHSGVTIQIMSYSEYHYCWRNFVDYPQGEEDYWPKYPYLWIMLYVLELHCIILGLPPCLKISGSHSNQLALFSLDLQDCHYQKIPYNVLVATGLVQPFVTWR

SEQ ID NO: 179 - protein, 236 aa, synthetic construct
  REGION 1..236: note = Synthetic
MTSEKGPSTGDPTLRRRIEPWEFDVFYDPRELRKEACLLYEIKWGMSRKIWRSSGKNTTNHVEVNFIKKFTSERDFHPSMSCSITWFLSWSPCWECSQAIREFLSRHPGVTLVIYVARLFWHMDQQNRQGLRDLVNSGVTIQIMRASEYYHCWRNFVNYPPGDEAHWPQYPPLWMMLYALELHCIILSLPPCLKISRRWQNHLTFFRLHLQNCHYQTIPPHILLATGLIHPSVAWR

SEQ ID NO: 180 - protein, 236 aa, synthetic construct
  REGION 1..236: note = Synthetic
MASEKGPSNKDYTLRRRIEPWEFEVFFDPQELRKEACLLYEIKWGASSKTWRSSGKNTTNHVEVNFLEKLTSEGRLGPSTCCSITWFLSWSPCWECSMAIREFLSQHPGVTLIIFVARLFQHMDRRNRQGLKDLVTSGVTVRVMSVSEYCYCWENFVNYPPGKAAQWPRYPPRWMLMYALELYCIILGLPPCLKISRRHQKQLTFFSLTPQYCHYKMIPPYILLATGLLQPSVPWR

SEQ ID NO: 181 - protein, 278 aa, synthetic construct
  REGION 1..278: note = Synthetic
MKVSLAGQTVDVKKILNEIPKRTVTAALLEGGEIVAVEEADDEHAERKLVRRHDVEGKVVFVTARPCLYCARELAEAGVAGVVYLGRGRGLGPYYLARSGVEVVEVHPDEPLGYDPVDRLDVLLTFGGNPYLTEEDVAARVYCLLTGRGFDADIAPAPENLSGRVEIMVTRGDPDEAVELLKEELPVFRIRRFLISGEFDRDELRERILEDIEPRILDPFAVRARIARAGAFSSSREAEVFIGDVLTSVGREVNLNDPRTVVTVDVLGPRVSVGVEKR

SEQ ID NO: 182 - protein, 294 aa, synthetic construct
  REGION 1..294: note = Synthetic
MHPRFQTAFAQLADNLQSALEPILADKYFPALLTGEQVSSLKSATGLDEDALAFALLPLAAACARTPLSNFNVGAIARGVSGTWYFGANMEFIGATMQQTVHAEQSAISHAWLSGEKALAAITVNYTPCGHCRQFMNELNSGLDLRIHLPGREAHALRDYLPDAFGPKDLEIKTLLMDEQDHGYALTGDALSQAAIAAANRSHMPYSKSPSGVALECKDGRIFSGSYAENAAFNPTLPPLQGALILLNLKGYDYPDIQRAVLAEKADAPLIQWDATSATLKALGCHSIDRVLLA

SEQ ID NO: 183 - protein, 295 aa, synthetic construct
  REGION 1..295: note = Synthetic
MRNRIEQALQQMPASFAPYLRELVLAKDFDATFSAEQYQQLLTLSGLEDADLRVALLPIAAAYSYAPISEFYVGAIVRGISGRLYLGANMEFTGAQLGQTVHAEQCAISHAWMKGEKGVADITINFSPCGHCRQFMNELTTASSLKIQLPKRAAKTLQEYLPESFGPADLGIDSGLMSPVNHGKTSDDDEELIQQALRAMNISHSPYTQNFSGVALKMRSGAIYLGAYAENAAFNPSLPPLQVALAQAMMMGESFEDIEAAALVESATGKISHLADTQATLEVINPDIPLSYLSL

SEQ ID NO: 184 - protein, 297 aa, synthetic construct
  REGION 1..297: note = Synthetic
MSWSPCFECAEQIVRFLATHHNLSLDIFSSRLYNVQDPETQQNLCRLVQEGAQVAAMDLYEFKKCWKKFVDNGGRRFRPWKRLLTNFRYQDSKLQEILRRMDPLSEEEFYSQFYNQRVKHLCYYHRMKPYLCYQLEQFNGQAPLKGCLLSEKGKQHAEILFLDKIRSMELSQVTITCYLTWSPCPNCAWQLAAFKRDRPDLILHIYTSRLYFHWKRPFQKGLCSLWQSGILVDVMDLPQFTDCWTNFVNPKRPFWPWKGLEIISRRTQRRLRRIKESWGLQDLVNDFGNLQLGPPMS

SEQ ID NO: 185 - protein, 301 aa, synthetic construct
  REGION 1..301: note = Synthetic
MDKPSFVIQSKEAESAAKQLGVSVIQLLPSLVKPAQSYARTPISKFNVAVVGLGSSGRIFLGVNVEFPNLPLHHSIHAEQFLVTNLTLNGERHLNFFAVSAAPCGHCRQFLQEIRDAPEIKILITDPNNSADSDSAADSDGFLRLGSFLPHRFGPDDLLGKDHPLLLESHDNHLKISDLDSICNGNTDSSADLKQTALAAANRSYAPYSLCPSGVSLVDCDGKVYRGWYMESAAYNPSMGPVQAALVDYVANGGGGGYERIVGAVLVEKEDAVVRQEHTARLLLETISPKCEFKVFHCYEA

SEQ ID NO: 186 - protein, 370 aa, synthetic construct
  REGION 1..370: note = Synthetic
MVEPMDPRTFVSNFNNRPILSGLNTVWLCCEVKTKDPSGPPLDAKIFQGKVYSKAKYHPEMRFLRWFHKWRQLHHDQEYKVTWYVSWSPCTRCANSVATFLAKDPKVTLTIFVARLYYFWKPDYQQALRILCQKRGGPHATMKIMNYNEFQDCWNKFVDGRGKPFKPRNNLPKHYTLLQATLGELLRHLMDPGTFTSNFNNKPWVSGQHETYLCYKVERLHNDTWVPLNQHRGFLRNQAPNIHGFPKGRHAELCFLDLIPFWKLDGQQYRVTCFTSWSPCFSCAQEMAKFISNNEHVSLCIFAARIYDDQGRYQEGLRALHRDGAKIAMMNYSEFEYCWDTFVDRQGRPFQPWDGLDEHSQALSGRLRAI

SEQ ID NO: 187 - protein, 373 aa, synthetic construct
  REGION 1..373: note = Synthetic
MKPHFRNTVERMYRDTFSYNFYNRPILSRRNTVWLCYEVKTKGPSRPRLDAKIFRGQVYSQPEHHAEMCFLSWFCGNQLPAYKCFQITWFVSWTPCPDCVAKLAEFLAEHPNVTLTISAARLYYYWERDYRRALCRLSQAGARVKIMDDEEFAYCWENFVYSEGQPFMPWYKFDDNYAFLHRTLKEILRNPMEAMYPHIFYFHFKNLRKAYGRNESWLCFTMEVVKHHSPVSWKRGVFRNQVDPETHCHAERCFLSWFCDDILSPNTNYEVTWYTSWSPCPECAGEVAEFLARHSNVNLTIFTARLYYFWDTDYQEGLRSLSQEGASVEIMGYKDFKYCWENFVYNDDEPFKPWKGLKYNFLFLDSKLQEILE

SEQ ID NO: 188 - protein, 377 aa, synthetic construct
  REGION 1..377: note = Synthetic
MNPQIRNMVEQMEPDIFVYYFNNRPILSGRNTVWLCYEVKTKDPSGPPLDANIFQGKLYPEAKDHPEMKFLHWFRKWRQLHRDQEYEVTWYVSWSPCTRCANSVATFLAEDPKVTLTIFVARLYYFWKPDYQQALRILCQERGGPHATMKIMNYNEFQHCWNEFVDGQGKPFKPRKNLPKHYTLLHATLGELLRHVMDPGTFTSNFNNKPWVSGQRETYLCYKVERSHNDTWVLLNQHRGFLRNQAPDRHGFPKGRHAELCFLDLIPFWKLDDQQYRVTCFTSWSPCFSCAQKMAKFISNNKHVSLCIFAARIYDDQGRCQEGLRTLHRDGAKIAVMNYSEFEYCWDTFVDRQGRPFQPWDGLDEHSQALSGRLRAI

SEQ ID NO: 189 - protein, 382 aa, synthetic construct
  REGION 1..382: note = Synthetic
MNPQIRNPMERMYRDTFYDNFENEPILYGRSYTWLCYEVKIKRGRSNLLWDTGVFRGQVYFKPQYHAEMCFLSWFCGNQLPAYKCFQITWFVSWTPCPDCVAKLAEFLSEHPNVTLTISAARLYYYWERDYRRALCRLSQAGARVTIMDYEEFAYCWENFVYNEGQQFMPWYKFDENYAFLHRTLKEILRYLMDPDTFTFNFNNDPLVLRRRQTYLCYEVERLDNGTWVLMDQHMGFLCNEAKNLLCGFYGRHAELRFLDLVPSLQLDPAQIYRVTWFISWSPCFSWGCAGEVRAFLQENTHVRLRIFAARIYDYDPLYKEALQMLRDAGAQVSIMTYDEFEYCWDTFVYRQGCPFQPWDGLEEHSQALSGRLRAILQNQGN

SEQ ID NO: 190 - protein, 383 aa, synthetic construct
  REGION 1..383: note = Synthetic
MKPQIRNMVEPMDPRTFVSNFNNRPILSGLDTVWLCCEVKTKDPSGPPLDAKIFQGKVYPKAKYHPEMRFLRWFHKWRQLHHDQEYKVTWYVSWSPCTRCANSVATFLAKDPKVTLTIFVARLYYFWKPDYQQALRILCQKRDGPHATMKIMNYNEFQDCWNKFVDGRGKPFKPWNNLPKHYTLLQATLGELLRHLMDPGTFTSNFNNKPWVSGQHETYLCYKVERLHNDTWVPLNQHRGFLRNQAPNIHGFPKGRHAELCFLDLIPFWKLDGQQYRVTCFTSWSPCFSCAQEMAKFISNNEHVSLCIFAARIYDDQGRYQEGLRTLHRDGAKIAMMNYSEFEYCWDTFVDRQGRPFQPWDGLDEHSQALSGRLRAILQNQGN

SEQ ID NO: 191 - protein, 384 aa, synthetic construct
  REGION 1..384: note = Synthetic
MKPHFRNTVERMYRDTFSYNFYNRPILSRRNTVWLCYEVKTKGPSRPPLDAKIFRGQVYSELKYHPEMRFFHWFSKWRKLHRDQEYEVTWYISWSPCTKCTRDMATFLAEDPKVTLTIFVARLYYFWDPDYQEALRSLCQKRDGPRATMKIMNYDEFQHCWSKFVYSQRELFEPWNNLPKYYILLHIMLGEILRHSMDPPTFTFNFNNEPWVRGRHETYLCYEVERMHNDTWVLLNQRRGFLCNQAPHKHGFLEGRHAELCFLDVIPFWKLDLDQDYRVTCFTSWSPCFSCAQEMAKFISKNKHVSLCIFTARIYDDQGRCQEGLRTLAEAGAKISIMTYSEFKHCWDTFVDHQGCPFQPWDGLDEHSQDLSGRLRAILQNQEN

SEQ ID NO: 192 - protein, 384 aa, synthetic construct
  REGION 1..384: note = Synthetic
MKPHFRNPVERMYQDTFSDNFYNRPILSHRNTVWLCYEVKTKGPSRPPLDAKIFRGQVYSKLKYHPEMRFFHWFSKWRKLHRDQEYEVTWYISWSPCTKCTRDVATFLAEDPKVTLTIFVARLYYFWDPDYQEALRSLCQKRDGPRATMKIMNYDEFQHCWSKFVYSQRELFEPWNNLPKYYILLHIMLGEILRHSMDPPTFTSNFNNELWVRGRHETYLCYEVERLHNDTWVLLNQRRGFLCNQAPHKHGFLEGRHAELCFLDVIPFWKLDLHQDYRVTCFTSWSPCFSCAQEMAKFISNNKHVSLCIFAARIYDDQGRCQEGLRTLAKAGAKISIMTYSEFKHCWDTFVDHQGCPFQPWDGLEEHSQALSGRLRAILQNQGN

SEQ ID NO: 193 - protein, 386 aa, synthetic construct
  REGION 1..386: note = Synthetic
MNPQIRNPMERMYRDTFYDNFENEPILYGRSYTWLCYEVKIKRGRSNLLWDTGVFRGPVLPKRQSNHRQEVYFRFENHAEMCFLSWFCGNRLPANRRFQITWFVSWNPCLPCVVKVTKFLAEHPNVTLTISAARLYYYRDRDWRWVLLRLHKAGARVKIMDYEDFAYCWENFVCNEGQPFMPWYKFDDNYASLHRTLKEILRNPMEAMYPHIFYFHFKNLLKACGRNESWLCFTMEVTKHHSAVFRKRGVFRNQVDPETHCHAERCFLSWFCDDILSPNTNYEVTWYTSWSPCPECAGEVAEFLARHSNVNLTIFTARLCYFWDTDYQEGLCSLSQEGASVKIMGYKDFVSCWKNFVYSDDEPFKPWKGLQTNFRLLKRRLREILQ

SEQ ID NO: 194 - protein, 392 aa, synthetic construct
  REGION 1..392: note = Synthetic
MQPQRLGPRAGMGPFCLGCSHRKCYSPIRNLISQETFKFHFKNLGYAKGRKDTFLCYEVTRKDCDSPVSLHHGVFKNKDNIHAEICFLYWFHDKVLKVLSPREEFKITWYMSWSPCFECAEQIVRFLATHHNLSLDIFSSRLYNVQDPETQQNLCRLVQEGAQVAAMDLYEFKKCWKKFVDNGGRRFRPWKRLLTNFRYQDSKLQEILRRMDPLSEEEFYSQFYNQRVKHLCYYHRMKPYLCYQLEQFNGQAPLKGCLLSEKGKQHAEILFLDKIRSMELSQVTITCYLTWSPCPNCAWQLAAFKRDRPDLILHIYTSRLYFHWKRPFQKGLCSLWQSGILVDVMDLPQFTDCWTNFVNPKRPFWPWKGLEIISRRTQRRLRRIKESRSHAS

SEQ ID NO: 195 - protein, 407 aa, synthetic construct
  REGION 1..407: note = Synthetic
MQPQRLGPRAGMGPFCLGCSHRKCYSPIRNLISQETFKFHFKNLGYAKGRKDTFLCYEVTRKDCDSPVSLHHGVFKNKDNIHAEICFLYWFHDKVLKVLSPREEFKITWYMSWSPCFECAEQIVRFLATHHNLSLDIFSSRLYNVQDPETQQNLCRLVQEGAQVAAMDLYEFKKCWKKFVDNGGRRFRPWKRLLTNFRYQDSKLQEILRRMDPLSEEEFYSQFYNQRVKHLCYYHRMKPYLCYQLEQFNGQAPLKGCLLSEKGKQHAEILFLDKIRSMELSQVTITCYLTWSPCPNCAWQLAAFKRDRPDLILHIYTSRLYFHWKRPFQKGLCSLWQSGILVDVMDLPQFTDCWTNFVNPKRPFWPWKGLEIISRRTQRRLRRIKESWGLQDLVNDFGNLQLGPPMS

SEQ ID NO: 196 - protein, 429 aa, synthetic construct
  REGION 1..429: note = Synthetic
MGPFCLGCSHRKCYSPIRNLISQETFKFHFKNLGYAKGRKDTFLCYEVTRKDCDSPVSLHHGVFKNKDNIHAEICFLYWFHDKVLKVLSPREEFKITWYMSWSPCFECAEQIVRFLATHHNLSLDIFSSRLYNVQDPETQQNLCRLVQEGAQVAAMDLYEFKKCWKKFVDNGGRRFRPWKRLLTNFRYQDSKLQEILRPCYISVPSSSSSTLSNICLTKGLPETRFWVEGRRMDPLSEEEFYSQFYNQRVKHLCYYHRMKPYLCYQLEQFNGQAPLKGCLLSEKGKQHAEILFLDKIRSMELSQVTITCYLTWSPCPNCAWQLAAFKRDRPDLILHIYTSRLYFHWKRPFQKGLCSLWQSGILVDVMDLPQFTDCWTNFVNPKRPFWPWKGLEIISRRTQRRLRRIKESWGLQDLVNDFGNLQLGPPMS

SEQ ID NO: 197 - protein, 429 aa, synthetic construct
  REGION 1..429: note = Synthetic
MGPFCLGCSHRKCYSPIRNLISQETFKFHFKNLGYAKGRKDTFLCYEVTRKDCDSPVSLHHGVFKNKDNIHAEICFLYWFHDKVLKVLSPREEFKITWYMSWSPCFECAEQIVRFLATHHNLSLDIFSSRLYNVQDPETQQNLCRLVQEGAQVAAMDLYEFKKCWKKFVDNGGRRFRPWKRLLTNFRYQDSKLQEILRPCYIPVPSSSSSTLSNICLTKGLPETRFCVEGRRMDPLSEEEFYSQFYNQRVKHLCYYHRMKPYLCYQLEQFNGQAPLKGCLLSEKGKQHAEILFLDKIRSMELSQVTITCYLTWSPCPNCAWQLAAFKRDRPDLILHIYTSRLYFHWKRPFQKGLCSLWQSGILVDVMDLPQFTDCWTNFVNPKRPFWPWKGLEIISRRTQRRLRRIKESWGLQDLVNDFGNLQLGPPMS

SEQ ID NO: 198 - protein, 430 aa, synthetic construct
  REGION 1..430: note = Synthetic
MQPQRLGPRAGMGPFCLGCSHRKCYSPIRNLISQETFKFHFKNLGYAKGRKDTFLCYEVTRKDCDSPVSLHHGVFKNKDNIHAEICFLYWFHDKVLKVLSPREEFKITWYMSWSPCFECAEQIVRFLATHHNLSLDIFSSRLYNVQDPETQQNLCRLVQEGAQVAAMDLYEFKKCWKKFVDNGGRRFRPWKRLLTNFRYQDSKLQEILRPCYISVPSSSSSTLSNICLTKGLPETRFWVEGRRMDPLSEEEFYSQFYNQRVKHLCYYHRMKPYLCYQLEQFNGQAPLKGCLLSEKGKQHAEILFLDKIRSMELSQVTITCYLTWSPCPNCAWQLAAFKRDRPDLILHIYTSRLYFHWKRPFQKGLCSLWQSGILVDVMDLPQFTDCWTNFVNPKRPFWPWKGLEIISRRTQRRLRRIKEVRTTLLQGPAS

SEQ ID NO: 199 - protein, 440 aa, synthetic construct
  REGION 1..440: note = Synthetic
MQPQRLGPRAGMGPFCLGCSHRKCYSPIRNLISQETFKFHFKNLGYAKGRKDTFLCYEVTRKDCDSPVSLHHGVFKNKDNIHAEICFLYWFHDKVLKVLSPREEFKITWYMSWSPCFECAEQIVRFLATHHNLSLDIFSSRLYNVQDPETQQNLCRLVQEGAQVAAMDLYEFKKCWKKFVDNGGRRFRPWKRLLTNFRYQDSKLQEILRPCYISVPSSSSSTLSNICLTKGLPETRFWVEGRRMDPLSEEEFYSQFYNQRVKHLCYYHRMKPYLCYQLEQFNGQAPLKGCLLSEKGKQHAEILFLDKIRSMELSQVTITCYLTWSPCPNCAWQLAAFKRDRPDLILHIYTSRLYFHWKRPFQKGLCSLWQSGILVDVMDLPQFTDCWTNFVNPKRPFWPWKGLEIISRRTQRRLRRIKESWGLQDLVNDFGNLQLGPPMS

SEQ ID NO: 200 - protein, 525 aa, synthetic construct
  REGION 1..525: note = Synthetic
MKETDQMQSLEGSGAERSVGTQTGSMTGQIPRLSKVNLFTLLSLWMELFPGVEAQGQKSQKTEEESRGPLGDNEELTRVSTEKKQVKKTGLVVVKNMKIIGLHCSSEDLHTGQIALIKHGSRLKNCDLYFSRKPCSACLKMIVNAGVNRISYWPSDPEISLLTEASSSEDAKLDAKAAERLKSNSRAHVCVLLQPLVCYMVQFVEETSYKCDFIQKTAKALPGADTDFYSECKQERIKEYEMLFLVSNEERHKQILMTIGLESLCEDPYFSNLRQNMKDLILLLATVASSVPNLKHFGFYCSSPEQINEIHNQSLPQEVARHCMVQARLLAYRTEDHKTGVGAVIWAEAKSRSCDGTGAMYFIGCGYNAFPVGSEYADFPHMDDKHKDREIRKFRYIIHAEQNALTFRCQDIKPEERSMIFVTKCPCDECVPLIKGAGIKQIYAGDVDVGKKKADISYMKFGELEGVRKFTWQLNPSEAYSLDPNEPERRENGVLRRRSAKDEQRSSKRPRLETRSAGSATTACF

SEQ ID NO: 201 - protein, 427 aa, synthetic construct
  REGION 1..427: note = Synthetic
MSNNALQTIINARLPGEEGLWQIHLQDGKISAIDAQSGVMPITENSLDAEQGLVIPPFVEPHIHLDTTQTAGQPNWNQSGTLFEGIERWAERKALLTHDDVKQRAWQTLKWQIANGIQHVRTHVDVSDATLTALKAMLEVKQEVAPWIDLQIVAFPQEGILSYPNGEALLEEALRLGADVVGAIPHFEFTREYGVESLHKTFALAQKYDRLIDVHCDEIDDEQSRFVETVAALAHHEGMGARVTASHTTAMHSYNGAYTSRLFRLLKMSGINFVANPLVNIHLQGRFDTYPKRRGITRVKEMLESGINVCFGHDDVFDPWYPLGTANMLQVLHMGLHVCQLMGYGQINDGLNLITHHSARTLNLQDYGIAAGNSANLIILPAENGFDALRRQVPVRYSVRGGKVIASTQPAQTTVYLEQPEAIDYKR

SEQ ID NO: 202 - protein, 210 aa, synthetic construct
  REGION 1..210: note = Synthetic
MALLTAKTFSLQFNNKRRVNKPYYPRKALLCYQLTPQNGSTPTRGHLKNKKKDHAEIRFINKIKSMGLDETQCYQVTCYLTWSPCPSCAGELVDFIKAHRHLNLRIFASRLYYHWRPNYQEGLLLLCGSQVPVEVMGLPEFTDCWENFVDHKEPPSFNPSEKLEELDKNSQAIKRRLERIKSRSVDVLENGLRSLQLGPVTPSSSIRNSR

SEQ ID NO: 203 - protein, 428 aa, synthetic construct
  REGION 1..428: note = Synthetic
MEKDINLKIFKGNLIFTKTSDKFTIMKDSYIVVIDGKIASVSSNLPDKYKGNPIIDFRNNIIIPGMNDLHAHASQYKNLGIGMDKELLPWLNNYTFPEEAKFLNVDYAKKTYGRLIKDLIKNGTTRVALFATLHKDSTIELFNMLIKSGIGAYVGKVNMDYNCPDYLTENYITSLNDTEEIILKYKDKSNIVKPIITPRFVPSCSNELMDGLGKLSYKYRLPVQSHLSENLDEIAVVKSLHKKSNFYGEVYDKFGLFGNTPTLMAHCIHSSKEEINLIKRNNVTIVHCPTSNFNLGSGMMPVRKYLNLGINVVLGSDISAGHTCSLFKVIAYAIQNSKIKWQESGKKDMFLSTSEAFYMATKKGGSFFGKVGSFEEGYDFDALVINDSNLYPEDYDLTERLERFIYLGDDRNIMKRYVCGNEIFGPKF

SEQ ID NO: 204 - protein, 412 aa, synthetic construct
  REGION 1..412: note = Synthetic
MKIINARLRRQEALFTLDLQDGIIHRITAQAAMQTADAGAIDAQGRLAIPPFVEPHIHLDATLTAGEPEWNRSGTLFEGITRWSQRKASITPEDTRQRALKTIGMLRDFGVQHVRTHVDVTDPSLAALQALLAVKQEAADLIDLQIVAFPQEGIESYPNGRELMTRAIEMGADVVGGIPHYENTRDKGVSSVMFLMDLAQRYGRLVDVHCDEIDDPQSRFLEVLAEEARVRGMGAQVTASHTCAMGSYDNAYCSKLFRLLKASGINFISCPTESIHLQGRFDSWPKRRGVTRVAELDRAGINVCFAQDSIQDPWYPLGNGNILRILDAGLHICHMLGYDDLQRCLDFVTDNSARALCLGDNYGLAEGRPANLLILDAENDYEAVRRQARVLTSIRHGKVILQREVEHIRYPA

SEQ ID NO: 205 - protein, 812 aa, synthetic construct
  REGION 1..812: note = Synthetic
MGRKLDPTKEKRGPGRKARKQKGAETELVRFLPAVSDENSKRLSSRARKRAAKRRLGSVEAPKTNKSPEAKPLPGKLPKGISAGAVQTAGKKGPQSLFNAPRGKKRPAPGSDEEEEEEDSEEDGMVNHGDLWGSEDDADTVDDYGADSNSEDEEEGEALLPIERAARKQKAREAAAGIQWSEEETEDEEEEKEVTPESGPPKVEEADGGLQINVDEEPFVLPPAGEMEQDAQAPDLQRVHKRIQDIVGILRDFGAQREEGRSRSEYLNRLKKDLAIYYSYGDFLLGKLMDLFPLSELVEFLEANEVPRPVTLRTNTLKTRRRDLAQALINRGVNLDPLGKWSKTGLVVYDSSVPIGATPEYLAGHYMLQGASSMLPVMALAPQEHERILDMCCAPGGKTSYMAQLMKNTGVILANDANAERLKSVVGNLHRLGVTNTIISHYDGRQFPKVVGGFDRVLLDAPCSGTGVISKDPAVKTNKDEKDILRCAHLQKELLLSAIDSVNATSKTGGYLVYCTCSITVEENEWVVDYALKKRNVRLVPTGLDFGQEGFTRFRERRFHPSLRSTRRFYPHTHNMDGFFIAKFKKFSNSIPQSQTGNSETATPTNVDLPQVIPKSENSSQPAKKAKGAAKTKQQLQKQQHPKKASFQKLNGISKGADSELSTVPSVTKTQASSSFQDSSQPAGKAEGIREPKVTGKLKQRSPKLQSSKKVAFLRQNAPPKGTDTQTPAVLSPSKTQATLKPKDHHQPLGRAKGVEKQQLPEQPFEKAAFQKQNDTPKGPQPPTVSPIRSSRPPPAKRKKSQSRGNSQLLLS

SEQ ID NO: 206 - protein, 767 aa, synthetic construct
  REGION 1..767: note = Synthetic
MGRRSRGRRLQQQQRPEDAEDGAEGGGKRGEAGWEGGYPEIVKENKLFEHYYQELKIVPEGEWGQFMDALREPLPATLRITGYKSHAKEILHCLKNKYFKELEDLEVDGQKVEVPQPLSWYPEELAWHTNLSRKILRKSPHLEKFHQFLVSETESGNISRQEAVSMIPPLLLNVRPHHKILDMCAAPGSKTTQLIEMLHADMNVPFPEGFVIANDVDNKRCYLLVHQAKRLSSPCIMVVNHDASSIPRLQIDVDGRKEILFYDRILCDVPCSGDGTMRKNIDVWKKWTTLNSLQLHGLQLRIATRGAEQLAEGGRMVYSTCSLNPIEDEAVIASLLEKSEGALELADVSNELPGLKWMPGITQWKVMTKDGQWFTDWDAVPHSRHTQIRPTMFPPKDPEKLQAMHLERCLRILPHHQNTGGFFVAVLVKKSSMPWNKRQPKLQGKSAETRESTQLSPADLTEGKPTDPSKLESPSFTGTGDTEIAHATEDLENNGSKKDGVCGPPPSKKMKLFGFKEDPFVFIPEDDPLFPPIEKFYALDPSFPRMNLLTRTTEGKKRQLYMVSKELRNVLLNNSEKMKVINTGIKVWCRNNSGEEFDCAFRLAQEGIYTLYPFINSRIITVSMEDVKILLTQENPFFRKLSSETYSQAKDLAKGSIVLKYEPDSANPDALQCPIVLCGWRGKASIRTFVPKNERLHYLRMMGLEVLGEKKKEGVILTNESAASTGQPDNDVTEGQRAGEPNSPDAEEANSPDVTAGCDPAGVHPPR

SEQ ID NO: 207 - protein, 429 aa, synthetic construct; identical to SEQ ID NO: 197
  REGION 1..429: note = Synthetic

SEQ ID NO: 208 - protein, 429 aa, synthetic construct
  REGION 1..429: note = Synthetic
MGPFCLGCSHRKCYSPIRNLISQETFKFHFKNLRYAIDRKDTFLCYEVTRKDCDSPVSLHHGVFKNKDNIHAEICFLYWFHDKVLKVLSPREEFKITWYMSWSPCFECAEQVLRFLATHHNLSLDIFSSRLYNIRDPENQQNLCRLVQEGAQVAAMDLYEFKKCWKKFVDNGGRRFRPWKKLLTNFRYQDSKLQEILRPCYIPVPSSSSSTLSNICLTKGLPETRFCVERRRVHLLSEEEFYSQFYNQRVKHLCYYHGVKPYLCYQLEQFNGQAPLKGCLLSEKGKQHAEILFLDKIRSMELSQVIITCYLTWSPCPNCAWQLAAFKRDRPDLILHIYTSRLYFHWKRPFQKGLCSLWQSGILVDVMDLPQFTDCWTNFVNPKRPFWPWKGLEIISRRTQRRLHRIKESWGLQDLVNDFGNLQLGPPMS

SEQ ID NO: 209 - protein, 370 aa, synthetic construct; identical to SEQ ID NO: 186
  REGION 1..370: note = Synthetic

SEQ ID NO: 210 - protein, 384 aa, synthetic construct; identical to SEQ ID NO: 192
  REGION 1..384: note = Synthetic

SEQ ID NO: 211 - protein, 377 aa, synthetic construct; identical to SEQ ID NO: 188
  REGION 1..377: note = Synthetic

SEQ ID NO: 212 - protein, 384 aa, synthetic construct; identical to SEQ ID NO: 191
  REGION 1..384: note = Synthetic

SEQ ID NO: 213 - protein, 373 aa, synthetic construct; identical to SEQ ID NO: 187
  REGION 1..373: note = Synthetic

SEQ ID NO: 214 - protein, 382 aa, synthetic construct; identical to SEQ ID NO: 189
  REGION 1..382: note = Synthetic

SEQ ID NO: 215 - protein, 386 aa, synthetic construct; identical to SEQ ID NO: 193
  REGION 1..386: note = Synthetic

SEQ ID NO: 216 - protein, 229 aa, synthetic construct [sequence omitted]

SEQ ID NO: 217-219 - skipped (3 entries)

SEQ ID NO: 220 - protein, 1082 aa, synthetic construct
  REGION 1..1082: note = Synthetic
MAAFKPNSINYILGLDIGIASVGWAMVEIDEEENPIRLIDLGVRVFERAEVPKTGDSLAMARRLARSVRRLTRRRAHRLLRTRRLLKREGVLQAANFDENGLIKSLPNTPWQLRAAALDRKLTPLEWSAVLLHLIKHRGYLSQRKNEGETADKELGALLKGVAGNAHALQTGDFRTPAELALNKFEKESGHIRNQRSDYSHTFSRKDLQAELILLFEKQKEFGNPHVSGGLKEGIETLLMTQRPALSGDAVQKMLGHCTFEPAEPKAAKNTYTAERFIWLTKLNNLRILEQGSERPLTDTERATLMDEPYRKSKLTYAQARKLLGLEDTAFFKGLRYGKDNAEASTLMEMKAYHAISRALEKEGLKDKKSPLNLSPELQDEIGTAFSLFKTDEDITGRLKDRIQPEILEALLKHISFDKFVQISLKALRRIVPLMEQGKRYDEACAEIYGDHYGKKNTEEKIYLPPIPADEIRNPVVLRALSQARKVINGVVRRYGSPARIHIETAREVGKSFKDRKEIEKRQEENRKDREKAAAKFREYFPNFVGEPKSKDILKLRLYEQQHGKCLYSGKEINLGRLNEKGYVEIDHALPFSRTWDDSFNNKVLVLGSENQNKGNQTPYEYFNGKDNSREWQEFKARVETSRFPRSKKQRILLQKFDEDGFKERNLNDTRYVNRFLCQFVADRMRLTGKGKKRVFASNGQITNLLRGFWGLRKVRAENDRHHALDAVVVACSTVAMQQKITRFVRYKEMNAFDGKTIDKETGEVLHQKTHFPQPWEFFAQEVMIRVFGKPDGKPEFEEADTLEKLRTLLAEKLSSRPEAVHEYVTPLFVSRAPNRKMSGQGHMETVKSAKRLDEGVSVLRVPLTQLKLKDLEKMVNREREPKLYEALKARLEAHKDDPAKAFAEPFYKYDKAGNRTQQVKAVRVEQVQKTGVWVRNHNGIADNATMVRVDVFEKGDKYYLVPIYSWQVAKGILPDRAVVQGKDEEDWQLIDDSFNFKFSLHPNDLVEVITKKARMFGYFASCHRGTGNINIRIHDLDHKIGKNGILEGIGVKTALSFQKYQIDELGKEIRPCRLKKRPPVR

SEQ ID NO: 221 - DNA, 3243 bp, synthetic construct
  misc_feature 1..3243: note = Synthetic
  source 1..3243: mol_type = other DNA
gctgcttttaagcctaattctattaattatattcttggtcttgatattggtattgcttctgttggttgggctatggttgagattgatgaggaggagaatcctattcgtcttattgatcttggtgttcgtgtttttgagcgtgctgaggttcctaagactggtgattctcttgctatggctcgtcgtcttgctcgttctgttcgtcgtcttactcgtcgtcgtgctcatcgtcttcttcgtactcgtcgtcttcttaagcgtgagggtgttcttcaggctgctaattttgatgagaatggtcttattaagtctcttcctaatactccttggcagcttcgtgctgctgctcttgatcgtaagcttactcctcttgagtggtctgctgttcttcttcatcttattaagcatcgtggttatctttctcagcgtaagaatgagggtgagactgctgataaggagcttggtgctcttcttaagggtgttgctggtaatgctcatgctcttcagactggtgattttcgtactcctgctgagcttgctcttaataagtttgagaaggagtctggtcatattcgtaatcagcgttctgattattctcatactttttctcgtaaggatcttcaggctgagcttattcttctttttgagaagcagaaggagtttggtaatcctcatgtttctggtggtcttaaggagggtattgagactcttcttatgactcagcgtcctgctctttctggtgatgctgttcagaagatgcttggtcattgtacttttgagcctgctgagcctaaggctgctaagaatacttatactgctgagcgttttatttggcttactaagcttaataatcttcgtattcttgagcagggttctgagcgtcctcttactgatactgagcgtgctactcttatggatgagccttatcgtaagtctaagcttacttatgctcaggctcgtaagcttcttggtcttgaggatactgctttttttaagggtcttcgttatggtaaggataatgctgaggcttctactcttatggagatgaaggcttatcatgctatttctcgtgctcttgagaaggagggtcttaaggataagaagtctcctcttaatctttctcctgagcttcaggatgagattggtactgctttttctctttttaagactgatgaggatattactggtcgtcttaaggatcgtattcagcctgagattcttgaggctcttcttaagcatatttcttttgataagtttgttcagatttctcttaaggctcttcgtcgtattgttcctcttatggagcagggtaagcgttatgatgaggcttgtgctgagatttatggtgatcattatggtaagaagaatactgaggagaagatttatcttcctcctattcctgctgatgagattcgtaatcctgttgttcttcgtgctctttctcaggctcgtaaggttattaatggtgttgttcgtcgttatggttctcctgctcgtattcatattgagactgctcgtgaggttggtaagtcttttaaggatcgtaaggagattgagaagcgtcaggaggagaatcgtaaggatcgtgagaaggctgctgctaagtttcgtgagtattttcctaattttgttggtgagcctaagtctaaggatattcttaagcttcgtctttatgagcagcagcatggtaagtgtctttattctggtaaggagattaatcttggtcgtcttaatgagaagggttatgttgagattgatcatgctcttcctttttctcgtacttgggatgattcttttaataataaggttcttgttcttggttctgagaatcagaataagggtaatcagactccttatgagtattttaatggtaaggataattctcgtgagtggcaggagtttaaggctcgtgttgagacttctcgttttcctcgttctaagaagcagcgtattcttcttcagaagtttgatgaggatggttttaaggagcgtaatcttaatgatactcgttatgttaatcgttttctttgtcagtttgttgctgatcgtatgcgtcttactggtaagggtaagaagcgtgtttttgcttctaatggtcagattactaatcttcttcgtggtttttggggtcttcgtaaggttcgtgctgagaatgatcgtcatcatgctcttgatgctgttgttgttgcttgttctactgttgctatgcagcagaagattactcgttttgttcgttataaggagatgaatgcttttgatggtaagactattgataaggagactggtgaggttcttcatcagaagactcattttcctcagccttgggagttttttgctcaggaggttatgattcgtgtttttggtaagcctgatggtaagcctgagtttgaggaggctgatactcttgagaagcttcgtactcttcttgctgagaagctttcttctcgtcctgaggctgttcatgagtatgttactcctctttttgtttctcgtgctcctaatcgtaagatgtctggtcagggtcatatggagactgttaagtctgctaagcgtcttgatgagggtgtttctgttcttcgtgttcctcttactcagcttaagcttaaggatcttgagaagatggttaatcgtgagcgtgagcctaagctttatgaggctcttaaggctcgtcttgaggctcataaggatgatcctgctaaggcttttgctgagcctttttataagtatgataaggctggtaatcgtactcagcaggttaaggctgttcgtgttgagcaggttcagaagactggtgtttgggttcgtaatcataatggtattgctgataatgctactatggttcgtgttgatgtttttgagaagggtgataagtattatcttgttcctatttattcttggcaggttgctaagggtattcttcctgatcgtgctgttgttcagggtaaggatgaggaggattggcagcttattgatgattcttttaattttaagttttctcttcatcctaatgatcttgttgaggttattactaagaaggctcgtatgtttggttattttgcttcttgtcatcgtggtactggtaatattaatattcgtattcatgatcttgatcataagattggtaagaatggtattcttgagggtattggtgttaagactgctctttcttttcagaagtatcagattgatgagcttggtaaggagattcgtccttgtcgtcttaagaagcgtcctcctgttcgt

SEQ ID NO: 222 - DNA, 3243 bp, synthetic construct
  misc_feature 1..3243: note = Synthetic
  source 1..3243: mol_type = other DNA
gccgccttcaagcccaactccatcaactacatcctgggcctggacatcggcatcgcctccgtgggctgggccatggtggagatcgacgaggaggagaaccccatccggctgatcgacctgggcgtgcgggtgttcgagcgggccgaggtgcccaagaccggcgactccctggccatggcccggcggctggcccggtccgtgcggcggctgacccggcggcgggcccaccggctgctgcggacccggcggctgctgaagcgggagggcgtgctgcaggccgccaacttcgacgagaacggcctgatcaagtccctgcccaacaccccctggcagctgcgggccgccgccctggaccggaagctgacccccctggagtggtccgccgtgctgctgcacctgatcaagcaccggggctacctgtcccagcggaagaacgagggcgagaccgccgacaaggagctgggcgccctgctgaagggcgtggccggcaacgcccacgccctgcagaccggcgacttccggacccccgccgagctggccctgaacaagttcgagaaggagtccggccacatccggaaccagcggtccgactactcccacaccttctcccggaaggacctgcaggccgagctgatcctgctgttcgagaagcagaaggagttcggcaacccccacgtgtccggcggcctgaaggagggcatcgagaccctgctgatgacccagcggcccgccctgtccggcgacgccgtgcagaagatgctgggccactgcaccttcgagcccgccgagcccaaggccgccaagaacacctacaccgccgagcggttcatctggctgaccaagctgaacaacctgcggatcctggagcagggctccgagcggcccctgaccgacaccgagcgggccaccctgatggacgagccctaccggaagtccaagctgacctacgcccaggcccggaagctgctgggcctggaggacaccgccttcttcaagggcctgcggtacggcaaggacaacgccgaggcctccaccctgatggagatgaaggcctaccacgccatctcccgggccctggagaaggagggcctgaaggacaagaagtcccccctgaacctgtcccccgagctgcaggacgagatcggcaccgccttctccctgttcaagaccgacgaggacatcaccggccggctgaaggaccggatccagcccgagatcctggaggccctgctgaagcacatctccttcgacaagttcgtgcagatctccctgaaggccctgcggcggatcgtgcccctgatggagcagggcaagcggtacgacgaggcctgcgccgagatctacggcgaccactacggcaagaagaacaccgaggagaagatctacctgccccccatccccgccgacgagatccggaaccccgtggtgctgcgggccctgtcccaggcccggaaggtgatcaacggcgtggtgcggcggtacggctcccccgcccggatccacatcgagaccgcccgggaggtgggcaagtccttcaaggaccggaaggagatcgagaagcggcaggaggagaaccggaaggaccgggagaaggccgccgccaagttccgggagtacttccccaacttcgtgggcgagcccaagtccaaggacatcctgaagctgcggctgtacgagcagcagcacggcaagtgcctgtactccggcaaggagatcaacctgggccggctgaacgagaagggctacgtggagatcgaccacgccctgcccttctcccggacctgggacgactccttcaacaacaaggtgctggtgctgggctccgagaaccagaacaagggcaaccagaccccctacgagtacttcaacggcaaggacaactcccgggagtggcaggagttcaaggcccgggtggagacctcccggttcccccggtccaagaagcagcggatcctgctgcagaagttcgacgaggacggcttcaaggagcggaacctgaacgacacccggtacgtgaaccggttcctgtgccagttcgtggccgaccggatgcggctgaccggcaagggcaagaagcgggtgttcgcctccaacggccagatcaccaacctgctgcggggcttctggggcctgcggaaggtgcgggccgagaacgaccggcaccacgccctggacgccgtggtggtggcctgctccaccgtggccatgcagcagaagatcacccggttcgtgcggtacaaggagatgaacgccttcgacggcaagaccatcgacaaggagaccggcgaggtgctgcaccagaagacccacttcccccagccctgggagttcttcgcccaggaggtgatgatccgggtgttcggcaagcccgacggcaagcccgagttcgaggaggccgacaccctggagaagctgcggaccctgctggccgagaagctgtcctcccggcccgaggccgtgcacgagtacgtgacccccctgttcgtgtcccgggcccccaaccggaagatgtccggccagggccacatggagaccgtgaagtccgccaagcggctggacgagggcgtgtccgtgctgcgggtgcccctgacccagctgaagctgaaggacctggagaagatggtgaaccgggagcgggagcccaagctgtacgaggccctgaaggcccggctggaggcccacaaggacgaccccgccaaggccttcgccgagcccttctacaagtacgacaaggccggcaaccggacccagcaggtgaaggccgtgcgggtggagcaggtgcagaagaccggcgtgtgggtgcggaaccacaacggcatcgccgacaacgccaccatggtgcgggtggacgtgttcgagaagggcgacaagtactacctggtgcccatctactcctggcaggtggccaagggcatcctgcccgaccgggccgtggtgcagggcaaggacgaggaggactggcagctgatcgacgactccttcaacttcaagttctccctgcaccccaacgacctggtggaggtgatcaccaagaaggcccggatgttcggctacttcgcctcctgccaccggggcaccggcaacatcaacatccggatccacgacctggaccacaagatcggcaagaacggcatcctggagggcatcggcgtgaagaccgccctgtccttccagaagtaccagatcgacgagctgggcaaggagatccggccctgccggctgaagaagcggccccccgtgcgg

SEQ ID NO: 223 - DNA, 3243 bp, synthetic construct
  misc_feature 1..3243: note = Synthetic
  source 1..3243: mol_type = other DNA
gcagcattcaaaccaaactcaatcaactacatcctaggactagacatcggaatcgcatcagtaggatgagcaatggtagaaatcgacgaagaagaaaacccaatccgactaatcgacctaggagtacgagtattcgaacgagcagaagtaccaaaaacaggagactcactagcaatggcacgacgactagcacgatcagtacgacgactaacacgacgacgagcacaccgactactacgaacacgacgactactaaaacgagaaggagtactacaagcagcaaacttcgacgaaaacggactaatcaaatcactaccaaacacaccatgacaactacgagcagcagcactagaccgaaaactaacaccactagaatgatcagcagtactactacacctaatcaaacaccgaggatacctatcacaacgaaaaaacgaaggagaaacagcagacaaagaactaggagcactactaaaaggagtagcaggaaacgcacacgcactacaaacaggagacttccgaacaccagcagaactagcactaaacaaattcgaaaaagaatcaggacacatccgaaaccaacgatcagactactcacacacattctcacgaaaagacctacaagcagaactaatcctactattcgaaaaacaaaaagaattcggaaacccacacgtatcaggaggactaaaagaaggaatcgaaacactactaatgacacaacgaccagcactatcaggagacgcagtacaaaaaatgctaggacactgcacattcgaaccagcagaaccaaaagcagcaaaaaacacatacacagcagaacgattcatctgactaacaaaactaaacaacctacgaatcctagaacaaggatcagaacgaccactaacagacacagaacgagcaacactaatggacgaaccataccgaaaatcaaaactaacatacgcacaagcacgaaaactactaggactagaagacacagcattcttcaaaggactacgatacggaaaagacaacgcagaagcatcaacactaatggaaatgaaagcataccacgcaatctcacgagcactagaaaaagaaggactaaaagacaaaaaatcaccactaaacctatcaccagaactacaagacgaaatcggaacagcattctcactattcaaaacagacgaagacatcacaggacgactaaaagaccgaatccaaccagaaatcctagaagcactactaaaacacatctcattcgacaaattcgtacaaatctcactaaaagcactacgacgaatcgtaccactaatggaacaaggaaaacgatacgacgaagcatgcgcagaaatctacggagaccactacggaaaaaaaaacacagaagaaaaaatctacctaccaccaatcccagcagacgaaatccgaaacccagtagtactacgagcactatcacaagcacgaaaagtaatcaacggagtagtacgacgatacggatcaccagcacgaatccacatcgaaacagcacgagaagtaggaaaatcattcaaagaccgaaaagaaatcgaaaaacgacaagaagaaaaccgaaaagaccgagaaaaagcagcagcaaaattccgagaatacttcccaaacttcgtaggagaaccaaaatcaaaagacatcctaaaactacgactatacgaacaacaacacggaaaatgcctatactcaggaaaagaaatcaacctaggacgactaaacgaaaaaggatacgtagaaatcgaccacgcactaccattctcacgaacatgagacgactcattcaacaacaaagtactagtactaggatcagaaaaccaaaacaaaggaaaccaaacaccatacgaatacttcaacggaaaagacaactcacgagaatgacaagaattcaaagcacgagtagaaacatcacgattcccacgatcaaaaaaacaacgaatcctactacaaaaattcgacgaagacggattcaaagaacgaaacctaaacgacacacgatacgtaaaccgattcctatgccaattcgtagcagaccgaatgcgactaacaggaaaaggaaaaaaacgagtattcgcatcaaacggacaaatcacaaacctactacgaggattctgaggactacgaaaagtacgagcagaaaacgaccgacaccacgcactagacgcagtagtagtagcatgctcaacagtagcaatgcaacaaaaaatcacacgattcgtacgatacaaagaaatgaacgcattcgacggaaaaacaatcgacaaagaaacaggagaagtactacaccaaaaaacacacttcccacaaccatgagaattcttcgcacaagaagtaatgatccgagtattcggaaaaccagacggaaaaccagaattcgaagaagcagacacactagaaaaactacgaacactactagcagaaaaactatcatcacgaccagaagcagtacacgaatacgtaacaccactattcgtatcacgagcaccaaaccgaaaaatgtcaggacaaggacacatggaaacagtaaaatcagcaaaacgactagacgaaggagtatcagtactacgagtaccactaacacaactaaaactaaaagacctagaaaaaatggtaaaccgagaacgagaaccaaaactatacgaagcactaaaagcacgactagaagcacacaaagacgacccagcaaaagcattcgcagaaccattctacaaatacgacaaagcaggaaaccgaacacaacaagtaaaagcagtacgagtagaacaagtacaaaaaacaggagtatgagtacgaaaccacaacggaatcgcagacaacgcaacaatggtacgagtagacgtattcgaaaaaggagacaaatactacctagtaccaatctactcatgacaagtagcaaaaggaatcctaccagaccgagcagtagtacaaggaaaagacgaagaagactgacaactaatcgacgactcattcaacttcaaattctcactacacccaaacgacctagtagaagtaatcacaaaaaaagcacgaatgttcggatacttcgcatcatgccaccgaggaacaggaaacatcaacatccgaatccacgacctagaccacaaaatcggaaaaaacggaatcctagaaggaatcggagtaaaaacagcactatcattccaaaaataccaaatcgacgaactaggaaaagaaatccgaccatgccgactaaaaaaacgaccaccagtacga

SEQ ID NO: 224 - RNA, 3249 nt, synthetic construct
  modified_base 2: mod_base = OTHER; note = thymine
  modified_base 6: mod_base = OTHER; note = thymine
  modified_base 9..12: mod_base = OTHER; note = thymine
  modified_base 18: mod_base = OTHER; note = thymine
  modified_base 21..22: mod_base = OTHER; note = thymine
  modified_base 24: mod_base = OTHER; note = thymine
  modified_base 26..27: mod_base = OTHER; note = thymine
  modified_base 30..31: mod_base = OTHER; note = thymine
  modified_base 33: mod_base = OTHER; note = thymine
  modified_base 35..36: mod_base = OTHER; note = thymine
  modified_base 38..39: mod_base = OTHER; note = thymine
  modified_base 42: mod_base = OTHER; note = thymine
  modified_base 44..45: mod_base = OTHER; note = thymine
  modified_base 48: mod_base = OTHER; note = thymine
  modified_base 50..51: mod_base = OTHER; note = thymine
  modified_base 54: mod_base = OTHER; note = thymine
  modified_base 56..57: mod_base = OTHER; note = thymine
  modified_base 60..61: mod_base = OTHER; note = thymine
  modified_base 63: mod_base = OTHER; note = thymine
  modified_base 65..66: mod_base = OTHER; note = thymine
  modified_base 69..70: mod_base = OTHER; note = thymine
  modified_base 75: mod_base = OTHER; note = thymine
  modified_base 77: mod_base = OTHER; note = thymine
  modified_base 80..81: mod_base = OTHER; note = thymine
  modified_base 86..87: mod_base = OTHER; note = thymine
  modified_base 90: mod_base = OTHER; note = thymine
  modified_base 102: mod_base = OTHER; note = thymine
  modified_base 105: mod_base = OTHER; note = thymine
  modified_base 107..108: mod_base = OTHER; note = thymine
  modified_base 111: mod_base = OTHER; note = thymine
  modified_base 113..114: mod_base = OTHER; note = thymine
  modified_base 116..117: mod_base = OTHER; note = thymine
  modified_base 120: mod_base = OTHER; note = thymine
  modified_base 122..123: mod_base = OTHER; note = thymine
  modified_base 126: mod_base = OTHER; note = thymine
  modified_base 128..129: mod_base = OTHER; note = thymine
  modified_base 132: mod_base = OTHER; note = thymine
  modified_base 134..138: mod_base = OTHER; note = thymine
  modified_base 144: mod_base = OTHER; note = thymine
  modified_base 147: mod_base = OTHER; note = thymine
  modified_base 152..153: mod_base = OTHER; note = thymine
  modified_base 156: mod_base = OTHER; note = thymine
  modified_base 162: mod_base = OTHER; note = thymine
  modified_base 165: mod_base = OTHER; note = thymine
  modified_base 168..169: mod_base = OTHER; note = thymine
  modified_base 171: mod_base = OTHER; note = thymine
  modified_base 173..174: mod_base = OTHER; note = thymine
  modified_base 177: mod_base = OTHER; note = thymine
  modified_base 179: mod_base = OTHER; note = thymine
  modified_base 183: mod_base = OTHER; note = thymine
  modified_base 186: mod_base = OTHER; note = thymine
  modified_base 189: mod_base = OTHER; note = thymine
  modified_base 191..192: mod_base = OTHER; note = thymine
  modified_base 195: mod_base = OTHER; note = thymine
  modified_base 198..199: mod_base = OTHER; note = thymine
  modified_base 201: mod_base = OTHER; note = thymine
  modified_base 203..204: mod_base = OTHER; note = thymine
  modified_base 207: mod_base = OTHER; note = thymine
  modified_base 210: mod_base = OTHER; note = thymine
  modified_base 212..213: mod_base = OTHER; note = thymine
  modified_base 216: mod_base = OTHER; note = thymine
  modified_base 219: mod_base = OTHER; note = thymine
  modified_base 222: mod_base = OTHER; note = thymine
  modified_base 225: mod_base = OTHER; note = thymine
  modified_base 228: mod_base = OTHER; note = thymine
  modified_base 231: mod_base = OTHER; note = thymine
  modified_base 234: mod_base = OTHER; note = thymine
  modified_base 236..237: mod_base = OTHER; note = thymine
  modified_base 239..240: mod_base = OTHER; note = thymine
  modified_base 243: mod_base = OTHER; note = thymine
  modified_base 246: mod_base = OTHER; note = thymine
  modified_base 249: mod_base = OTHER; note = thymine
  modified_base 252: mod_base = OTHER; note = thymine
  modified_base 254..255: mod_base = OTHER; note = thymine
  modified_base 257..258: mod_base = OTHER; note = thymine
  modified_base 264: mod_base = OTHER; note = thymine
  modified_base 270: mod_base = OTHER; note = thymine
  modified_base 272..273: mod_base = OTHER; note = thymine
  modified_base 275..276: mod_base = OTHER; note = thymine
  modified_base 282: mod_base = OTHER; note = thymine
  modified_base 285: mod_base = OTHER; note = thymine
  modified_base 288..291: mod_base = OTHER; note = thymine
  modified_base 294: mod_base = OTHER; note = thymine
  modified_base 300: mod_base = OTHER; note = thymine
  modified_base 303: mod_base = OTHER; note = thymine
  modified_base 305..306: mod_base = OTHER; note = thymine
  modified_base 308..309: mod_base = OTHER; note = thymine
  modified_base 313: mod_base = OTHER; note = thymine
  modified_base 315: mod_base = OTHER; note = thymine
  modified_base 317..318: mod_base = OTHER; note = thymine
  modified_base 321: mod_base = OTHER; note = thymine
  modified_base 324: mod_base = OTHER; note = thymine
  modified_base 327: mod_base = OTHER; note = thymine
  modified_base 330..331: mod_base = OTHER; note = thymine
  modified_base 338..339: mod_base = OTHER; note = thymine
  modified_base 342: mod_base = OTHER; note = thymine
  modified_base 345: mod_base = OTHER; note = thymine
  modified_base 348: mod_base = OTHER; note = thymine
  modified_base 351: mod_base = OTHER; note = thymine
  modified_base 353..354: mod_base = OTHER; note = thymine
  modified_base 357: mod_base = OTHER; note = thymine
  modified_base 360: mod_base = OTHER; note = thymine
  modified_base 365..366: mod_base = OTHER; note = thymine
  modified_base 369: mod_base = OTHER; note = thymine
  modified_base 372: mod_base = OTHER; note = thymine
  modified_base 374..375: mod_base = OTHER; note = thymine
  modified_base 379: mod_base = OTHER; note = thymine
  modified_base 382: mod_base = OTHER; note = thymine
  modified_base 384: mod_base = OTHER; note = thymine
  modified_base 387: mod_base = OTHER; note = thymine
  modified_base 389..390: mod_base = OTHER; note = thymine
  modified_base 392..393: mod_base = OTHER; note = thymine
  modified_base 395..396: mod_base = OTHER; note = thymine
  modified_base 399: mod_base = OTHER; note = thymine
  modified_base 401..402: mod_base = OTHER; note = thymine
  modified_base 404..405: mod_base = OTHER; note = thymine
  modified_base 411: mod_base = OTHER; note = thymine
  modified_base 414: mod_base = OTHER; note = thymine
  modified_base 417..418: mod_base = OTHER; note = thymine
  modified_base 420: mod_base = OTHER; note = thymine
  modified_base 422..424: mod_base = OTHER; note = thymine
  modified_base 426: mod_base = OTHER; note = thymine
  modified_base 432: mod_base = OTHER; note = thymine
  modified_base 438: mod_base = OTHER; note = thymine
  modified_base 444: mod_base = OTHER; note = thymine
  modified_base 450: mod_base = OTHER; note = thymine
  modified_base 453: mod_base = OTHER; note = thymine
  modified_base 456: mod_base = OTHER; note = thymine
  modified_base 464..465: mod_base = OTHER; note = thymine
  modified_base 468: mod_base = OTHER; note = thymine
  modified_base 471: mod_base = OTHER; note = thymine
  modified_base 473..474: mod_base = OTHER; note = thymine
  modified_base 476..477: mod_base = OTHER; note = thymine
  modified_base 483: mod_base = OTHER; note = thymine
  modified_base 485..486: mod_base = OTHER; note = thymine
  modified_base 489: mod_base = OTHER; note = thymine
  modified_base 492: mod_base = OTHER; note = thymine
  modified_base 495: mod_base = OTHER; note = thymine
  modified_base 498: mod_base = OTHER; note = thymine
  modified_base 501: mod_base = OTHER; note = thymine
  modified_base 504: mod_base = OTHER; note = thymine
  modified_base 506..507: mod_base = OTHER; note = thymine
  modified_base 513: mod_base = OTHER; note = thymine
  modified_base 516: mod_base = OTHER; note = thymine
  modified_base 519..522: mod_base = OTHER; note = thymine
  modified_base 525: mod_base = OTHER; note = thymine
  modified_base 528: mod_base = OTHER; note = thymine
  modified_base 531: mod_base = OTHER; note = thymine
  modified_base 534: mod_base = OTHER; note = thymine
  modified_base 539..540: mod_base = OTHER; note = thymine
  modified_base 543: mod_base = OTHER; note = thymine
  modified_base 545..546: mod_base = OTHER; note = thymine
  modified_base 549: mod_base = OTHER; note = thymine
  modified_base 553..555: mod_base = OTHER; note = thymine
  modified_base 565: mod_base = OTHER; note = thymine
  modified_base 567: mod_base = OTHER; note = thymine
  modified_base 570: mod_base = OTHER; note = thymine
  modified_base 573: mod_base = OTHER; note = thymine
  modified_base 575..576: mod_base = OTHER; note = thymine
  modified_base 579: mod_base = OTHER; note = thymine
  modified_base 582: mod_base = OTHER; note = thymine
  modified_base 588..589: mod_base = OTHER; note = thymine
  modified_base 591: mod_base = OTHER; note = thymine
  modified_base 594..595: mod_base = OTHER; note = thymine
  modified_base 597..598: mod_base = OTHER; note = thymine
  modified_base 600: mod_base = OTHER; note = thymine
  modified_base 603: mod_base = OTHER; note = thymine
  modified_base 606..610: mod_base = OTHER; note = thymine
  modified_base 612: mod_base = OTHER; note = thymine
  modified_base 615: mod_base = OTHER; note = thymine
  modified_base 621: mod_base = OTHER; note = thymine
  modified_base 623..624: mod_base = OTHER; note = thymine
  modified_base 630: mod_base = OTHER; note = thymine
  modified_base 635..636: mod_base = OTHER; note = thymine
  modified_base 638..639: mod_base = OTHER; note = thymine
  modified_base 641..642: mod_base = OTHER; note = thymine
  modified_base 644..648: mod_base = OTHER; note = thymine
  modified_base 664..666: mod_base = OTHER; note = thymine
  modified_base 669: mod_base = OTHER; note = thymine
  modified_base 672: mod_base = OTHER; note = thymine
  modified_base 675: mod_base = OTHER; note = thymine
  modified_base 678: mod_base = OTHER; note = thymine
  modified_base 680..682: mod_base = OTHER; note = thymine
  modified_base 684: mod_base = OTHER; note = thymine
  modified_base 687: mod_base = OTHER; note = thymine
  modified_base 690: mod_base = OTHER; note = thymine
  modified_base 692..693: mod_base = OTHER; note = thymine
  modified_base 702: mod_base = OTHER; note = thymine
  modified_base 704..705: mod_base = OTHER; note = thymine
  modified_base 711: mod_base = OTHER; note = thymine
  modified_base 713..714: mod_base = OTHER; note = thymine
  modified_base 716..717: mod_base = OTHER; note = thymine
  modified_base 719: mod_base = OTHER; note = thymine
  modified_base 723: mod_base = OTHER; note = thymine
  modified_base 729: mod_base = OTHER; note = thymine
  modified_base 732: mod_base = OTHER; note = thymine
  modified_base 735: mod_base = OTHER; note = thymine
  modified_base 737..739: mod_base = OTHER; note = thymine
  modified_base 741: mod_base = OTHER; note = thymine
  modified_base 744: mod_base = OTHER; note = thymine
  modified_base 747: mod_base = OTHER; note = thymine
  modified_base 750: mod_base = OTHER; note = thymine
  modified_base 752..753: mod_base = OTHER; note = thymine
  modified_base 761: mod_base = OTHER; note = thymine
  modified_base 764..765: mod_base = OTHER; note = thymine
  modified_base 768: mod_base = OTHER; note = thymine
  modified_base 771..772: mod_base = OTHER; note = thymine
  modified_base 774: mod_base = OTHER; note = thymine
  modified_base 777..780: mod_base = OTHER; note = thymine
  modified_base 786: mod_base = OTHER; note = thymine
  modified_base 789: mod_base = OTHER; note = thymine
  modified_base 795: mod_base = OTHER; note = thymine
  modified_base 801: mod_base = OTHER; note = thymine
  modified_base 804: mod_base = OTHER; note = thymine
  modified_base 810: mod_base = OTHER; note = thymine
  modified_base 813..814: mod_base = OTHER; note = thymine
  modified_base 816: mod_base = OTHER; note = thymine
  modified_base 819: mod_base = OTHER; note = thymine
  modified_base 822: mod_base = OTHER; note = thymine
  modified_base 828..831: mod_base = OTHER; note = thymine
  modified_base 833..835: mod_base = OTHER; note = thymine
  modified_base 839..840: mod_base = OTHER; note = thymine
  modified_base 843: mod_base = OTHER; note = thymine
  modified_base 848..849: mod_base = OTHER; note = thymine
  modified_base 852: mod_base = OTHER; note = thymine
  modified_base 855: mod_base = OTHER; note = thymine
  modified_base 857..858: mod_base = OTHER; note = thymine
  modified_base 861: mod_base = OTHER; note = thymine
  modified_base 863..864: mod_base = OTHER; note = thymine
  modified_base 866..867: mod_base = OTHER; note = thymine
  modified_base 876..877: mod_base = OTHER; note = thymine
  modified_base 879: mod_base = OTHER; note = thymine
  modified_base 885: mod_base = OTHER; note = thymine
  modified_base 888: mod_base = OTHER; note = thymine
  modified_base 890..891: mod_base = OTHER; note = thymine
  modified_base 894: mod_base = OTHER; note = thymine
  modified_base 897: mod_base = OTHER; note = thymine
  modified_base 900: mod_base = OTHER; note = thymine
  modified_base 906: mod_base = OTHER; note = thymine
  modified_base 909: mod_base = OTHER; note = thymine
  modified_base 912: mod_base = OTHER; note = thymine
  modified_base 914..915: mod_base = OTHER; note = thymine
  modified_base 917: mod_base = OTHER; note = thymine
  modified_base 921: mod_base = OTHER; note = thymine
  modified_base 927..928: mod_base = OTHER; note = thymine
  modified_base 930: mod_base = OTHER; note = thymine
  modified_base 933: mod_base = OTHER; note = thymine
  modified_base 937: mod_base = OTHER; note = thymine
  modified_base 939: mod_base = OTHER; note = thymine
  modified_base 944..945: mod_base = OTHER; note = thymine
  modified_base 948..949: mod_base = OTHER; note = thymine
  modified_base 951: mod_base = OTHER; note = thymine
  modified_base 954: mod_base = OTHER; note = thymine
  modified_base 960: mod_base = OTHER; note = thymine
  modified_base 963: mod_base = OTHER; note = thymine
  modified_base 968..969: mod_base = OTHER; note = thymine
  modified_base 971..972: mod_base = OTHER; note = thymine
  modified_base 975: mod_base = OTHER; note = thymine
  modified_base 977..978: mod_base = OTHER; note = thymine
  modified_base 984: mod_base = OTHER; note = thymine
  modified_base 987: mod_base = OTHER; note = thymine
  modified_base 990..996: mod_base = OTHER; note = thymine
  modified_base 1002: mod_base = OTHER; note = thymine
  modified_base 1004..1005: mod_base = OTHER; note = thymine
  modified_base 1008..1009: mod_base = OTHER; note = thymine
  modified_base 1011: mod_base = OTHER; note = thymine
  modified_base 1014: mod_base = OTHER; note = thymine
  modified_base 1020: mod_base = OTHER; note = thymine
  modified_base 1023: mod_base = OTHER; note = thymine
  modified_base 1026: mod_base = OTHER; note = thymine
  modified_base 1032..1033: mod_base = OTHER; note = thymine
  modified_base 1035: mod_base = OTHER; note = thymine
  modified_base 1038: mod_base = OTHER; note = thymine
  modified_base 1040..1041: mod_base = OTHER; note = thymine
  modified_base 1043: mod_base = OTHER; note = thymine
  modified_base 1049: mod_base = OTHER; note = thymine
  modified_base 1056..1057: mod_base = OTHER; note = thymine
  modified_base 1059: mod_base = OTHER; note = thymine
  modified_base 1062: mod_base = OTHER; note = thymine
  modified_base 1065: mod_base = OTHER; note = thymine
  modified_base 1067..1069: mod_base = OTHER; note = thymine
  modified_base 1071: mod_base = OTHER; note = thymine
  modified_base 1074: mod_base = OTHER; note = thymine
  modified_base 1077: mod_base = OTHER; note = thymine
  modified_base 1079..1080: mod_base = OTHER; note = thymine
  modified_base 1092: mod_base = OTHER; note = thymine
  modified_base 1094..1095: mod_base = OTHER; note = thymine
  modified_base 1101: mod_base = OTHER; note = thymine
  modified_base 1108: mod_base = OTHER; note = thymine
  modified_base 1110: mod_base = OTHER; note = thymine
  modified_base 1113: mod_base = OTHER; note = thymine
  modified_base 1115..1116: mod_base = OTHER; note = thymine
  modified_base 1119: mod_base = OTHER; note = thymine
  modified_base 1121..1123: mod_base = OTHER; note = thymine
  modified_base 1125: mod_base = OTHER; note = thymine
  modified_base 1128: mod_base = OTHER; note = thymine
  modified_base 1133..1134: mod_base = OTHER; note = thymine
  modified_base 1140: mod_base = OTHER; note = thymine
  modified_base 1145..1146: mod_base = OTHER; note = thymine
  modified_base 1149: mod_base = OTHER; note = thymine
  modified_base 1152: mod_base = OTHER; note = thymine
  modified_base 1155..1159: mod_base = OTHER; note = thymine
  modified_base 1161: mod_base = OTHER; note = thymine
  modified_base 1163..1167: mod_base = OTHER; note = thymine
  modified_base 1173: mod_base = OTHER; note = thymine
  modified_base 1176: mod_base = OTHER; note = thymine
  modified_base 1182: mod_base = OTHER; note = thymine
  modified_base 1184..1185: mod_base = OTHER; note = thymine
  modified_base 1188: mod_base = OTHER; note = thymine
  modified_base 1191: mod_base = OTHER; note = thymine
  modified_base 1194: mod_base = OTHER; note = thymine
  modified_base 1196..1197: mod_base = OTHER; note = thymine
  modified_base 1203: mod_base = OTHER; note = thymine
  modified_base 1206: mod_base = OTHER; note = thymine
  modified_base 1208..1209: mod_base = OTHER; note = thymine
  modified_base 1215: mod_base = OTHER; note = thymine
  modified_base 1220..1221: mod_base = OTHER; note = thymine
  modified_base 1223..1224: mod_base = OTHER; note = thymine
  modified_base 1230: mod_base = OTHER; note = thymine
  modified_base 1232..1233: mod_base = OTHER; note = thymine
  modified_base 1235..1236: mod_base = OTHER; note = thymine
  modified_base 1242: mod_base = OTHER; note = thymine
  modified_base 1244..1246: mod_base = OTHER; note = thymine
  modified_base 1248..1251: mod_base = OTHER; note = thymine
  modified_base 1254: mod_base = OTHER; note = thymine
  modified_base 1258..1260: mod_base = OTHER; note = thymine
  modified_base 1262..1263: mod_base = OTHER; note = thymine
  modified_base 1268..1270: mod_base = OTHER; note = thymine
  modified_base 1272: mod_base = OTHER; note = thymine
  modified_base 1274..1275: mod_base = OTHER; note = thymine
  modified_base 1281: mod_base = OTHER; note = thymine
  modified_base 1283..1284: mod_base = OTHER; note = thymine
  modified_base 1287: mod_base = OTHER; note = thymine
  modified_base 1290: mod_base = OTHER; note = thymine
  modified_base 1292..1293: mod_base = OTHER; note = thymine
  modified_base 1295..1296: mod_base = OTHER; note = thymine
  modified_base 1299: mod_base = OTHER; note = thymine
  modified_base 1301..1302: mod_base = OTHER; note = thymine
  modified_base 1304: mod_base = OTHER; note = thymine
  modified_base 1314: mod_base = OTHER; note = thymine
  modified_base 1320..1321: mod_base = OTHER; note = thymine
  modified_base 1323: mod_base = OTHER; note = thymine
  modified_base 1326: mod_base = OTHER; note = thymine
  modified_base 1332..1333: mod_base = OTHER; note = thymine
  modified_base 1335: mod_base = OTHER; note = thymine
  modified_base 1338: mod_base = OTHER; note = thymine
  modified_base 1343..1345: mod_base = OTHER; note = thymine
  modified_base 1347: mod_base = OTHER; note = thymine
  modified_base 1350: mod_base = OTHER; note = thymine
  modified_base 1353: mod_base = OTHER; note = thymine
  modified_base 1356..1357: mod_base = OTHER; note = thymine
  modified_base 1359: mod_base = OTHER; note = thymine
  modified_base 1362: mod_base = OTHER; note = thymine
  modified_base 1371: mod_base = OTHER; note = thymine
  modified_base 1374: mod_base = OTHER; note = thymine
  modified_base 1385..1387: mod_base = OTHER; note = thymine
  modified_base 1389: mod_base = OTHER; note = thymine
  modified_base 1391..1392: mod_base = OTHER; note = thymine
  modified_base 1395: mod_base = OTHER; note = thymine
  modified_base 1398: mod_base = OTHER; note = thymine
  modified_base 1400..1401: mod_base = OTHER; note = thymine
  modified_base 1404: mod_base = OTHER; note = thymine
  modified_base 1407: mod_base = OTHER; note = thymine
  modified_base 1410: mod_base = OTHER; note = thymine
  modified_base 1415..1416: mod_base = OTHER; note = thymine
  modified_base 1419: mod_base = OTHER; note = thymine
  modified_base 1422: mod_base = OTHER; note = thymine
  modified_base 1425: mod_base = OTHER; note = thymine
  modified_base 1427..1428: mod_base = OTHER; note = thymine
  modified_base 1430..1431: mod_base = OTHER; note = thymine
  modified_base 1433..1434: mod_base = OTHER; note = thymine
  modified_base 1437: mod_base = OTHER; note = thymine
  modified_base 1440: mod_base = OTHER; note = thymine
  modified_base 1442..1444: mod_base = OTHER; note = thymine
  modified_base 1446: mod_base = OTHER; note = thymine
  modified_base 1452: mod_base = OTHER; note = thymine
  modified_base 1455: mod_base = OTHER; note = thymine
  modified_base 1460..1461: mod_base = OTHER; note = thymine
  modified_base 1463..1464: mod_base = OTHER; note = thymine
  modified_base 1467: mod_base = OTHER; note = thymine
  modified_base 1470: mod_base = OTHER; note = thymine
  modified_base 1472..1473: mod_base = OTHER; note = thymine
  modified_base 1475..1476: mod_base = OTHER; note = thymine
  modified_base 1479: mod_base = OTHER; note = thymine
  modified_base 1482..1483: mod_base = OTHER; note = thymine
  modified_base 1485: mod_base = OTHER; note = thymine
  modified_base 1488..1489: mod_base = OTHER; note = thymine
  modified_base 1491: mod_base = OTHER; note = thymine
  modified_base 1494: mod_base = OTHER; note = thymine
  modified_base 1497: mod_base = OTHER; note = thymine
  modified_base 1500: mod_base = OTHER; note = thymine
  modified_base 1502..1503: mod_base = OTHER; note = thymine
  modified_base 1506: mod_base = OTHER; note = thymine
  modified_base 1508..1509: mod_base = OTHER; note = thymine
  modified_base 1515: mod_base = OTHER; note = thymine
  modified_base 1518: mod_base = OTHER; note = thymine
  modified_base 1521: mod_base = OTHER; note = thymine
  modified_base 1526..1527: mod_base = OTHER; note = thymine
  modified_base 1530: mod_base = OTHER; note = thymine
  modified_base 1534: mod_base = OTHER; note = thymine
  modified_base 1536..1539: mod_base = OTHER; note = thymine
  modified_base 1545: mod_base = OTHER; note = thymine
  modified_base 1548: mod_base = OTHER; note = thymine
  modified_base 1556..1557: mod_base = OTHER; note = thymine
  modified_base 1566: mod_base = OTHER; note = thymine
  modified_base 1578: mod_base = OTHER; note = thymine
  modified_base 1581: mod_base = OTHER; note = thymine
  modified_base 1587: mod_base = OTHER; note = thymine
  modified_base 1590: mod_base = OTHER; note = thymine
  modified_base 1599: mod_base = OTHER; note = thymine
  modified_base 1602: mod_base = OTHER; note = thymine
  modified_base 1605: mod_base = OTHER; note = thymine
  modified_base 1609..1611: mod_base = OTHER; note = thymine
  modified_base 1614: mod_base = OTHER; note = thymine
  modified_base 1618: mod_base = OTHER; note = thymine
  modified_base 1620..1623: mod_base = OTHER; note = thymine
  modified_base 1626: mod_base = OTHER; note = thymine
  modified_base 1629..1632: mod_base = OTHER; note = thymine
  modified_base 1634..1635: mod_base = OTHER; note = thymine
  modified_base 1638: mod_base = OTHER; note = thymine
  modified_base 1644: mod_base = OTHER; note = thymine
  modified_base 1648: mod_base = OTHER; note = thymine
  modified_base 1650: mod_base = OTHER; note = thymine
  modified_base 1656: mod_base = OTHER; note = thymine
  modified_base 1658..1659: mod_base = OTHER; note = thymine
  modified_base 1661..1662: mod_base = OTHER; note = thymine
  modified_base 1667..1668: mod_base = OTHER; note = thymine
  modified_base 1671: mod_base = OTHER; note = thymine
  modified_base 1673..1675: mod_base = OTHER; note = thymine
  modified_base 1677: mod_base = OTHER; note = thymine
  modified_base 1689: mod_base = OTHER; note = thymine
  modified_base 1692: mod_base = OTHER; note = thymine
  modified_base 1696: mod_base = OTHER; note = thymine
  modified_base 1698: mod_base = OTHER; note = thymine
  modified_base 1700..1702: mod_base = OTHER; note = thymine
  modified_base 1704..1705: mod_base = OTHER; note = thymine
  modified_base 1707: mod_base = OTHER; note = thymine
  modified_base 1710: mod_base = OTHER; note = thymine
  modified_base 1718..1719: mod_base = OTHER; note = thymine
  modified_base 1722: mod_base = OTHER; note = thymine
  modified_base 1724..1725: mod_base = OTHER; note = thymine
  modified_base 1728: mod_base = OTHER; note = thymine
  modified_base 1731: mod_base = OTHER; note = thymine
  modified_base 1733..1734: mod_base = OTHER; note = thymine
  modified_base 1737: mod_base = OTHER; note = thymine
  modified_base 1746..1747: mod_base = OTHER; note = thymine
  modified_base 1749: mod_base = OTHER; note = thymine
  modified_base 1751..1752: mod_base = OTHER; note = thymine
  modified_base 1757..1758: mod_base = OTHER; note = thymine
  modified_base 1761: mod_base = OTHER; note = thymine
  modified_base 1764: mod_base = OTHER; note = thymine
  modified_base 1767: mod_base = OTHER; note = thymine
  modified_base 1769..1770: mod_base = OTHER; note = thymine
  modified_base 1773..1777: mod_base = OTHER; note = thymine
  modified_base 1779: mod_base = OTHER; note = thymine
  modified_base 1782: mod_base = OTHER; note = thymine
  modified_base 1785..1786: mod_base = OTHER; note = thymine
  modified_base 1791: mod_base = OTHER; note = thymine
  modified_base 1794..1795: mod_base = OTHER; note = thymine
  modified_base 1797..1800: mod_base = OTHER; note = thymine
  modified_base 1803: mod_base = OTHER; note = thymine
  modified_base 1806: mod_base = OTHER; note = thymine
  modified_base 1811..1812: mod_base = OTHER; note = thymine
  modified_base 1814..1815: mod_base = OTHER; note = thymine
  modified_base 1817..1818: mod_base = OTHER; note = thymine
  modified_base 1820..1821: mod_base = OTHER; note = thymine
  modified_base 1824..1825: mod_base = OTHER; note = thymine
  modified_base 1827: mod_base = OTHER; note = thymine
  modified_base 1833: mod_base = OTHER; note = thymine
  modified_base 1839: mod_base = OTHER; note = thymine
  modified_base 1845: mod_base = OTHER; note = thymine
  modified_base 1848: mod_base = OTHER; note = thymine
  modified_base 1854: mod_base = OTHER; note = thymine
  modified_base 1857..1858: mod_base = OTHER; note = thymine
  modified_base 1860: mod_base = OTHER; note = thymine
  modified_base 1864: mod_base = OTHER; note = thymine
  modified_base 1866..1869: mod_base = OTHER; note = thymine
  modified_base 1872: mod_base = OTHER; note = thymine
  modified_base 1875: mod_base = OTHER; note = thymine
  modified_base 1881: mod_base = OTHER; note = thymine
  modified_base 1884..1885: mod_base = OTHER; note = thymine
  modified_base 1887: mod_base = OTHER; note = thymine
  modified_base 1890: mod_base = OTHER; note = thymine
  modified_base 1894: mod_base = OTHER; note = thymine
  modified_base 1903..1905: mod_base = OTHER; note = thymine
  modified_base 1911: mod_base = OTHER; note = thymine
  modified_base 1914: mod_base = OTHER; note = thymine
  modified_base 1916..1917: mod_base = OTHER; note = thymine
  modified_base 1923..1924: mod_base = OTHER; note = thymine
  modified_base 1926: mod_base = OTHER; note = thymine
  modified_base 1929..1932: mod_base = OTHER; note = thymine
  modified_base 1935: mod_base = OTHER; note = thymine
  modified_base 1938..1939: mod_base = OTHER; note = thymine
  modified_base 1941: mod_base = OTHER; note = thymine
  modified_base 1953: mod_base = OTHER; note = thymine
  modified_base 1955..1956: mod_base = OTHER; note = thymine
  modified_base 1958..1959: mod_base = OTHER; note = thymine
  modified_base 1961..1962: mod_base = OTHER; note = thymine
  modified_base 1969..1971: mod_base = OTHER; note = thymine
  modified_base 1974: mod_base = OTHER; note = thymine
  modified_base 1980: mod_base = OTHER; note = thymine
  modified_base 1983..1986: mod_base = OTHER; note = thymine
  modified_base 1995: mod_base = OTHER; note = thymine
  modified_base 1998: mod_base = OTHER; note = thymine
  modified_base 2000..2001: mod_base = OTHER; note = thymine
  modified_base 2004: mod_base = OTHER; note = thymine
  modified_base 2007: mod_base = OTHER; note = thymine
  modified_base 2010: mod_base = OTHER; note = thymine
  modified_base 2013..2014: mod_base = OTHER; note = thymine
  modified_base 2016: mod_base = OTHER; note = thymine
  modified_base 2018..2019: mod_base = OTHER; note = thymine
  modified_base 2022: mod_base = OTHER; note = thymine
  modified_base 2025..2028: mod_base = OTHER; note = thymine
  modified_base 2030..2032: mod_base = OTHER; note = thymine
  modified_base 2034: mod_base = OTHER; note = thymine
  modified_base 2038..2040: mod_base = OTHER; note = thymine
  modified_base 2042..2043: mod_base = OTHER; note = thymine
  modified_base 2046: mod_base = OTHER; note = thymine
  modified_base 2049: mod_base = OTHER; note = thymine
  modified_base 2052: mod_base = OTHER; note = thymine
  modified_base 2054: mod_base = OTHER; note = thymine
  modified_base 2058: mod_base = OTHER; note = thymine
  modified_base 2060..2061: mod_base = OTHER; note = thymine
  modified_base 2064: mod_base = OTHER; note = thymine
  modified_base 2067: mod_base = OTHER; note = thymine
  modified_base 2073: mod_base = OTHER; note = thymine
  modified_base 2082: mod_base = OTHER; note = thymine
  modified_base 2084..2088: mod_base = OTHER; note = thymine
  modified_base 2091..2092: mod_base = OTHER; note = thymine
  modified_base 2094: mod_base = OTHER; note = thymine
  modified_base 2097: mod_base = OTHER; note = thymine
  modified_base 2100: mod_base = OTHER; note = thymine
  modified_base 2105..2106: mod_base = OTHER; note = thymine
  modified_base 2109: mod_base = OTHER; note = thymine
  modified_base 2112: mod_base = OTHER; note = thymine
  modified_base 2114..2115: mod_base = OTHER; note = thymine
  modified_base 2117..2118: mod_base = OTHER; note = thymine
  modified_base 2121: mod_base = OTHER; note = thymine
  modified_base 2124..2128: mod_base = OTHER; note = thymine
  modified_base 2133: mod_base = OTHER; note = thymine
  modified_base 2135..2136: mod_base = OTHER; note = thymine
  modified_base 2139: mod_base = OTHER; note = thymine
  modified_base 2144..2145: mod_base = OTHER; note = thymine
  modified_base 2148: mod_base = OTHER; note = thymine
  modified_base 2151: mod_base = OTHER; note = thymine
  modified_base 2157: mod_base = OTHER; note = thymine
  modified_base 2160: mod_base = OTHER; note = thymine
  modified_base 2163: mod_base = OTHER; note = thymine
  modified_base 2166: mod_base = OTHER; note = thymine
  modified_base 2169: mod_base = OTHER; note = thymine
  modified_base 2172: mod_base = OTHER; note = thymine
  modified_base 2174..2175: mod_base = OTHER; note = thymine
  modified_base 2178: mod_base = OTHER; note = thymine
  modified_base 2181: mod_base = OTHER; note = thymine
  modified_base 2183..2184: mod_base = OTHER; note = thymine
  modified_base 2186..2187: mod_base = OTHER; note = thymine
  modified_base 2189..2190: mod_base = OTHER; note = thymine
  modified_base 2193..2194: mod_base = OTHER; note = thymine
  modified_base 2196..2197: mod_base = OTHER; note = thymine
  modified_base 2199: mod_base = OTHER; note = thymine
  modified_base 2202: mod_base = OTHER; note = thymine
  modified_base 2204..2205: mod_base = OTHER; note = thymine
  modified_base 2208: mod_base = OTHER; note = thymine
  modified_base 2210: mod_base = OTHER; note = thymine
  modified_base 2222..2223: mod_base = OTHER; note = thymine
  modified_base 2226: mod_base = OTHER; note = thymine
  modified_base 2229..2232: mod_base = OTHER; note = thymine
  modified_base 2234..2235: mod_base = OTHER; note = thymine
  modified_base 2238..2239: mod_base = OTHER; note = thymine
  modified_base 2241: mod_base = OTHER; note = thymine
  modified_base 2249: mod_base = OTHER; note = thymine
  modified_base 2253: mod_base = OTHER; note = thymine
  modified_base 2256..2259: mod_base = OTHER; note = thymine
  modified_base 2262: mod_base = OTHER; note = thymine
  modified_base 2265: mod_base = OTHER; note = thymine
  modified_base 2271: mod_base = OTHER; note = thymine
  modified_base 2273..2274: mod_base = OTHER; note = thymine
  modified_base 2277: mod_base = OTHER; note = thymine
  modified_base 2286: mod_base = OTHER; note = thymine
  modified_base 2289: mod_base = OTHER; note = thymine
  modified_base 2294..2295: mod_base = OTHER; note = thymine
  modified_base 2297..2298: mod_base = OTHER; note = thymine
  modified_base 2301: mod_base = OTHER; note = thymine
  modified_base 2310: mod_base = OTHER; note = thymine
  modified_base 2313..2316: mod_base = OTHER; note = thymine
  modified_base 2319: mod_base = OTHER; note = thymine
  modified_base 2325..2326: mod_base = OTHER; note = thymine
  modified_base 2332..2337: mod_base = OTHER; note = thymine
  modified_base 2340: mod_base = OTHER; note = thymine
  modified_base 2348..2349: mod_base = OTHER; note = thymine
  modified_base 2351: mod_base = OTHER; note = thymine
  modified_base 2354..2355: mod_base = OTHER; note = thymine
  modified_base 2358: mod_base = OTHER; note = thymine
  modified_base 2360..2364: mod_base = OTHER; note = thymine
  modified_base 2367: mod_base = OTHER; note = thymine
  modified_base 2373: mod_base = OTHER; note = thymine
  modified_base 2376: mod_base = OTHER; note = thymine
  modified_base 2379: mod_base = OTHER; note = thymine
  modified_base 2385: mod_base = OTHER; note = thymine
  modified_base 2389..2391: mod_base = OTHER; note = thymine
  modified_base 2400: mod_base = OTHER; note = thymine
  modified_base 2403: mod_base = OTHER; note = thymine
  modified_base 2406: mod_base = OTHER; note = thymine
  modified_base 2408..2409: mod_base = OTHER; note = thymine
  modified_base 2417..2418: mod_base = OTHER; note = thymine
  modified_base 2421: mod_base = OTHER; note = thymine
  modified_base 2424: mod_base = OTHER; note = thymine
  modified_base 2426..2427: mod_base = OTHER; note = thymine
  modified_base 2429..2430: mod_base = OTHER; note = thymine
  modified_base 2433: mod_base = OTHER; note = thymine
  modified_base 2441..2443: mod_base = OTHER; note = thymine
  modified_base 2445..2446: mod_base = OTHER; note = thymine
  modified_base 2448: mod_base = OTHER; note = thymine
  modified_base 2451: mod_base = OTHER; note = thymine
  modified_base 2454: mod_base = OTHER; note = thymine
  modified_base 2460: mod_base = OTHER; note = thymine
  modified_base 2462..2463: mod_base = OTHER; note = thymine
  modified_base 2466: mod_base = OTHER; note = thymine
  modified_base 2470: mod_base = OTHER; note = thymine
  modified_base 2472: mod_base = OTHER; note = thymine
  modified_base 2474..2475: mod_base = OTHER; note = thymine
  modified_base 2478: mod_base = OTHER; note = thymine
  modified_base 2481: mod_base = OTHER; note = thymine
  modified_base 2483..2487: mod_base = OTHER; note = thymine
  modified_base 2489..2491: mod_base = OTHER; note = thymine
  modified_base 2493: mod_base = OTHER; note = thymine
  modified_base 2496: mod_base = OTHER; note = thymine
  modified_base 2499: mod_base = OTHER; note = thymine
  modified_base 2502: mod_base = OTHER; note = thymine
  modified_base 2505: mod_base = OTHER; note = thymine
  modified_base 2508: mod_base = OTHER; note = thymine
  modified_base 2513: mod_base = OTHER; note = thymine
  modified_base 2515: mod_base = OTHER; note = thymine
  modified_base 2517: mod_base = OTHER; note = thymine
  modified_base 2520: mod_base = OTHER; note = thymine
  modified_base 2526: mod_base = OTHER; note = thymine
  modified_base 2529: mod_base = OTHER; note = thymine
  modified_base 2531: mod_base = OTHER; note = thymine
  modified_base 2538: mod_base = OTHER; note = thymine
  modified_base 2540..2541: mod_base = OTHER; note = thymine
  modified_base 2545: mod_base = OTHER; note = thymine
  modified_base 2547: mod_base = OTHER; note = thymine
  modified_base 2550: mod_base = OTHER; note = thymine
  modified_base 2556: mod_base = OTHER; note = thymine
  modified_base 2558..2559: mod_base = OTHER; note = thymine
  modified_base 2562: mod_base = OTHER; note = thymine
  modified_base 2568: mod_base = OTHER; note = thymine
  modified_base 2570..2572: mod_base = OTHER; note = thymine
  modified_base 2574: mod_base = OTHER; note = thymine
  modified_base 2576..2577: mod_base = OTHER; note = thymine
  modified_base 2579..2580: mod_base = OTHER; note = thymine
  modified_base 2583: mod_base = OTHER; note = thymine
  modified_base 2585..2586: mod_base = OTHER; note = thymine
  modified_base 2589: mod_base = OTHER; note = thymine
  modified_base 2591..2592: mod_base = OTHER; note = thymine
  modified_base 2595: mod_base = OTHER; note = thymine
  modified_base 2600..2601: mod_base = OTHER; note = thymine
  modified_base 2606..2607: mod_base = OTHER; note = thymine
  modified_base 2613: mod_base = OTHER; note = thymine
  modified_base 2615..2616: mod_base = OTHER; note = thymine
  modified_base 2624: mod_base = OTHER; note = thymine
  modified_base 2627..2628: mod_base = OTHER; note = thymine
  modified_base 2631: mod_base = OTHER; note = thymine
  modified_base 2634: mod_base = OTHER; note = thymine
  modified_base 2640: mod_base = OTHER; note = thymine
  modified_base 2646: mod_base = OTHER; note = thymine
  modified_base 2651..2653: mod_base = OTHER; note = thymine
  modified_base 2655: mod_base = OTHER; note = thymine
  modified_base 2661: mod_base = OTHER; note = thymine
  modified_base 2663..2664: mod_base = OTHER; note = thymine
  modified_base 2670: mod_base = OTHER; note = thymine
  modified_base 2673: mod_base = OTHER; note = thymine
  modified_base 2675..2676: mod_base = OTHER; note = thymine
  modified_base 2682: mod_base = OTHER; note = thymine
  modified_base 2685: mod_base = OTHER; note = thymine
  modified_base 2691: mod_base = OTHER; note = thymine
  modified_base 2694: mod_base = OTHER; note = thymine
  modified_base 2697: mod_base = OTHER; note = thymine
  modified_base 2700: mod_base = OTHER; note = thymine
  modified_base 2706..2709: mod_base = OTHER; note = thymine
  modified_base 2712: mod_base = OTHER; note = thymine
  modified_base 2718..2722: mod_base = OTHER; note = thymine
  modified_base 2724: mod_base = OTHER; note = thymine
  modified_base 2728: mod_base = OTHER; note = thymine
  modified_base 2730: mod_base = OTHER; note = thymine
  modified_base 2733: mod_base = OTHER; note = thymine
  modified_base 2739: mod_base = OTHER; note = thymine
  modified_base 2742: mod_base = OTHER; note = thymine
  modified_base 2745: mod_base = OTHER; note = thymine
  modified_base 2748: mod_base = OTHER; note = thymine
  modified_base 2751: mod_base = OTHER; note = thymine
  modified_base 2759..2760: mod_base = OTHER; note = thymine
  modified_base 2766: mod_base = OTHER; note = thymine
  modified_base 2768..2769: mod_base = OTHER; note = thymine
  modified_base 2772: mod_base = OTHER; note = thymine
  modified_base 2774..2775: mod_base = OTHER; note = thymine
  modified_base 2783..2784: mod_base = OTHER; note = thymine
  modified_base 2793: mod_base = OTHER; note = thymine
  modified_base 2796: mod_base = OTHER; note = thymine
  modified_base 2798..2800: mod_base = OTHER; note = thymine
  modified_base 2804..2805: mod_base = OTHER; note = thymine
  modified_base 2808: mod_base = OTHER; note = thymine
  modified_base 2811: mod_base = OTHER; note = thymine
  modified_base 2814: mod_base = OTHER; note = thymine
  modified_base 2817: mod_base = OTHER; note = thymine
  modified_base 2820: mod_base = OTHER; note = thymine
  modified_base 2822..2823: mod_base = OTHER; note = thymine
  modified_base 2826: mod_base = OTHER; note = thymine
  modified_base 2829: mod_base = OTHER; note = thymine
  modified_base 2832: mod_base = OTHER; note = thymine
  modified_base 2835: mod_base = OTHER; note = thymine
  modified_base 2838: mod_base = OTHER; note = thymine
  modified_base 2840: mod_base = OTHER; note = thymine
  modified_base 2843..2844: mod_base = OTHER; note = thymine
  modified_base 2847: mod_base = OTHER; note = thymine
  modified_base 2849..2850: mod_base = OTHER; note = thymine
  modified_base 2853: mod_base = OTHER; note = thymine
  modified_base 2855..2859: mod_base = OTHER; note = thymine
  modified_base 2868: mod_base = OTHER; note = thymine
  modified_base 2871: mod_base = OTHER; note = thymine
  modified_base 2875: mod_base = OTHER; note = thymine
  modified_base 2877..2878: mod_base = OTHER; note = thymine
  modified_base 2880: mod_base = OTHER; note = thymine
  modified_base 2882..2883: mod_base = OTHER; note = thymine
  modified_base 2885..2886: mod_base = OTHER; note = thymine
  modified_base 2889: mod_base = OTHER; note = thymine
  modified_base 2891..2893: mod_base = OTHER; note = thymine
  modified_base 2895..2896: mod_base = OTHER; note = thymine
  modified_base 2898..2899: mod_base = OTHER; note = thymine
  modified_base 2906..2907: mod_base = OTHER; note = thymine
  modified_base 2910: mod_base = OTHER; note = thymine
  modified_base 2916: mod_base = OTHER; note = thymine
  modified_base 2918..2919: mod_base = OTHER; note = thymine
  modified_base 2921..2922: mod_base = OTHER; note = thymine
  modified_base 2925: mod_base = OTHER; note = thymine
  modified_base 2928: mod_base = OTHER; note = thymine
  modified_base 2931: mod_base = OTHER; note = thymine
  modified_base 2934: mod_base = OTHER; note = thymine
  modified_base 2936..2937: mod_base = OTHER; note = thymine
  modified_base 2939..2940: mod_base = OTHER; note = thymine
  modified_base 2946: mod_base = OTHER; note = thymine
  modified_base 2952: mod_base = OTHER; note = thymine
  modified_base 2961..2962: mod_base = OTHER; note = thymine
  modified_base 2969..2970: mod_base = OTHER; note = thymine
  modified_base 2972..2973: mod_base = OTHER; note = thymine
  modified_base 2976: mod_base = OTHER; note = thymine
  modified_base 2979..2980: mod_base = OTHER; note = thymine
  modified_base 2982..2985: mod_base = OTHER; note = thymine
  modified_base 2988..2991: mod_base = OTHER; note = thymine
  modified_base 2995..2998: mod_base = OTHER; note = thymine
  modified_base 3000: mod_base = OTHER; note = thymine
  modified_base 3002..3003: mod_base = OTHER; note = thymine
  modified_base 3006: mod_base = OTHER; note = thymine
  modified_base 3009: mod_base = OTHER; note = thymine
  modified_base 3012: mod_base = OTHER; note = thymine
  modified_base 3015: mod_base = OTHER; note = thymine
  modified_base 3017..3018: mod_base = OTHER; note = thymine
  modified_base 3020..3021: mod_base = OTHER; note = thymine
  modified_base 3026..3027: mod_base = OTHER; note = thymine
  modified_base 3029..3030: mod_base = OTHER; note = thymine
  modified_base 3033: mod_base = OTHER; note = thymine
  modified_base 3042: mod_base = OTHER; note = thymine
  modified_base 3045: mod_base = OTHER; note = thymine
  modified_base 3047: mod_base = OTHER; note = thymine
  modified_base 3049..3051: mod_base = OTHER; note = thymine
  modified_base 3054..3055: mod_base = OTHER; note = thymine
  modified_base 3057..3060: mod_base = OTHER; note = thymine
  modified_base 3063..3064: mod_base = OTHER; note = thymine
  modified_base 3066..3067: mod_base = OTHER; note = thymine
  modified_base 3069: mod_base = OTHER; note = thymine
  modified_base 3072: mod_base = OTHER; note = thymine
  modified_base 3075: mod_base = OTHER; note = thymine
  modified_base 3078: mod_base = OTHER; note = thymine
  modified_base 3081: mod_base = OTHER; note = thymine
  modified_base 3084: mod_base = OTHER; note = thymine
  modified_base 3087: mod_base = OTHER; note = thymine
  modified_base 3089..3090: mod_base = OTHER; note = thymine
  modified_base 3093: mod_base = OTHER; note = thymine
  modified_base 3095..3096: mod_base = OTHER; note = thymine
  modified_base 3099: mod_base = OTHER; note = thymine
  modified_base 3101..3102: mod_base = OTHER; note = thymine
  modified_base 3105: mod_base = OTHER; note = thymine
  modified_base 3108: mod_base = OTHER; note = thymine
  modified_base 3110..3111: mod_base = OTHER; note = thymine
  modified_base 3114: mod_base = OTHER; note = thymine
  modified_base 3117: mod_base = OTHER; note = thymine
  modified_base 3122..3123: mod_base = OTHER; note = thymine
  modified_base 3126: mod_base = OTHER; note = thymine
  modified_base 3132: mod_base = OTHER; note = thymine
  modified_base 3135: mod_base = OTHER; note = thymine
  modified_base 3137..3138: mod_base = OTHER; note = thymine
  modified_base 3140..3141: mod_base = OTHER; note = thymine
  modified_base 3147: mod_base = OTHER; note = thymine
  modified_base 3149..3150: mod_base = OTHER; note = thymine
  modified_base 3153: mod_base = OTHER; note = thymine
  modified_base 3155..3156: mod_base = OTHER; note = thymine
  modified_base 3162: mod_base = OTHER; note = thymine
  modified_base 3165: mod_base = OTHER; note = thymine
  modified_base 3167..3169: mod_base = OTHER; note = thymine
  modified_base 3171..3174: mod_base = OTHER; note = thymine
  modified_base 3181: mod_base = OTHER; note = thymine
  modified_base 3183: mod_base = OTHER; note = thymine
  modified_base 3188..3189: mod_base = OTHER; note = thymine
  modified_base 3192: mod_base = OTHER; note = thymine
  modified_base 3197..3198: mod_base = OTHER; note = thymine
  modified_base 3201: mod_base = OTHER; note = thymine
  modified_base 3209..3210: mod_base = OTHER; note = thymine
  modified_base 3213: mod_base = OTHER; note = thymine
  modified_base 3216..3217: mod_base = OTHER; note = thymine
  modified_base 3219: mod_base = OTHER; note = thymine
  modified_base 3222: mod_base = OTHER; note = thymine
  modified_base 3224..3225: mod_base = OTHER; note = thymine
  modified_base 3234: mod_base = OTHER; note = thymine
  modified_base 3237: mod_base = OTHER; note = thymine
  modified_base 3240: mod_base = OTHER; note = thymine
  modified_base 3242..3243: mod_base = OTHER; note = thymine
  modified_base 3246: mod_base = OTHER; note = thymine
  misc_feature 1..3249: note = Synthetic
  source 1..3249: mol_type = other RNA
atggctgcttttaagcctaattctattaattatattcttggtcttgatattggtattgcttctgttggttgggctatggttgagattgatgaggaggagaatcctattcgtcttattgatcttggtgttcgtgtttttgagcgtgctgaggttcctaagactggtgattctcttgctatggctcgtcgtcttgctcgttctgttcgtcgtcttactcgtcgtcgtgctcatcgtcttcttcgtactcgtcgtcttcttaagcgtgagggtgttcttcaggctgctaattttgatgagaatggtcttattaagtctcttcctaatactccttggcagcttcgtgctgctgctcttgatcgtaagcttactcctcttgagtggtctgctgttcttcttcatcttattaagcatcgtggttatctttctcagcgtaagaatgagggtgagactgctgataaggagcttggtgctcttcttaagggtgttgctggtaatgctcatgctcttcagactggtgattttcgtactcctgctgagcttgctcttaataagtttgagaaggagtctggtcatattcgtaatcagcgttctgattattctcatactttttctcgtaaggatcttcaggctgagcttattcttctttttgagaagcagaaggagtttggtaatcctcatgtttctggtggtcttaaggagggtattgagactcttcttatgactcagcgtcctgctctttctggtgatgctgttcagaagatgcttggtcattgtacttttgagcctgctgagcctaaggctgctaagaatacttatactgctgagcgttttatttggcttactaagcttaataatcttcgtattcttgagcagggttctgagcgtcctcttactgatactgagcgtgctactcttatggatgagccttatcgtaagtctaagcttacttatgctcaggctcgtaagcttcttggtcttgaggatactgctttttttaagggtcttcgttatggtaaggataatgctgaggcttctactcttatggagatgaaggcttatcatgctatttctcgtgctcttgagaaggagggtcttaaggataagaagtctcctcttaatctttctcctgagcttcaggatgagattggtactgctttttctctttttaagactgatgaggatattactggtcgtcttaaggatcgtattcagcctgagattcttgaggctcttcttaagcatatttcttttgataagtttgttcagatttctcttaaggctcttcgtcgtattgttcctcttatggagcagggtaagcgttatgatgaggcttgtgctgagatttatggtgatcattatggtaagaagaatactgaggagaagatttatcttcctcctattcctgctgatgagattcgtaatcctgttgttcttcgtgctctttctcaggctcgtaaggttattaatggtgttgttcgtcgttatggttctcctgctcgtattcatattgagactgctcgtgaggttggtaagtcttttaaggatcgtaaggagattgagaagcgtcaggaggagaatcgtaaggatcgtgagaaggctgctgctaagtttcgtgagtattttcctaattttgttggtgagcctaagtctaaggatattcttaagcttcgtctttatgagcagcagcatggtaagtgtctttattctggtaaggagattaatcttggtcgtcttaatgagaagggttatgttgagattgatcatgctcttcctttttctcgtacttgggatgattcttttaataataaggttcttgttcttggttctgagaatcagaataagggtaatcagactccttatgagtattttaatggtaaggataattctcgtgagtggcaggagtttaaggctcgtgttgagacttctcgttttcctcgttctaagaagcagcgtattcttcttcagaagtttgatgaggatggttttaaggagcgtaatcttaatgatactcgttatgttaatcgttttctttgtcagtttgttgctgatcgtatgcgtcttactggtaagggtaagaagcgtgtttttgcttctaatggtcagattactaatcttcttcgtggtttttggggtcttcgtaaggttcgtgctgagaatgatcgtcatcatgctcttgatgctgttgttgttgcttgttctactgttgctatgcagcagaagattactcgttttgttcgttataaggagatgaatgcttttgatggtaagactattgataaggagactggtgaggttcttcatcagaagactcattttcctcagccttgggagttttttgctcaggaggttatgattcgtgtttttggtaagcctgatggtaagcctgagtttgaggaggctgatactcttgagaagcttcgtactcttcttgctgagaagctttcttctcgtcctgaggctgttcatgagtatgttactcctctttttgtttctcgtgctcctaatcgtaagatgtctggtcagggtcatatggagactgttaagtctgctaagcgtcttgatgagggtgtttctgttcttcgtgttcctcttactcagcttaagcttaaggatcttgagaagatggttaatcgtgagcgtgagcctaagctttatgaggctcttaaggctcgtcttgaggctcataaggatgatcctgctaaggcttttgctgagcctttttataagtatgataaggctggtaatcgtactcagcaggttaaggctgttcgtgttgagcaggttcagaagactggtgtttgggttcgtaatcataatggtattgctgataatgctactatggttcgtgttgatgtttttgagaagggtgataagtattatcttgttcctatttattcttggcaggttgctaagggtattcttcctgatcgtgctgttgttcagggtaaggatgaggaggattggcagcttattgatgattcttttaattttaagttttctcttcatcctaatgatcttgttgaggttattactaagaaggctcgtatgtttggttattttgcttcttgtcatcgtggtactggtaatattaatattcgtattcatgatcttgatcataagattggtaagaatggtattcttgagggtattggtgttaagactgctctttcttttcagaagtatcagattgatgagcttggtaaggagattcgtccttgtcgtcttaagaagcgtcctcctgttcgttga

SEQ ID NO: 225 - RNA, 3249 nt, synthetic construct
  modified_base 2: mod_base = OTHER; note = thymine
  modified_base 10..11: mod_base = OTHER; note = thymine
  modified_base 22: mod_base = OTHER; note = thymine
  modified_base 26: mod_base = OTHER; note = thymine
  modified_base 31: mod_base = OTHER; note = thymine
  modified_base 35: mod_base = OTHER; note = thymine
  modified_base 38: mod_base = OTHER; note = thymine
  modified_base 44: mod_base = OTHER; note = thymine
  modified_base 50: mod_base = OTHER; note = thymine
  modified_base 56: mod_base = OTHER; note = thymine
  modified_base 61: mod_base = OTHER; note = thymine
  modified_base 65: mod_base = OTHER; note = thymine
  modified_base 70: mod_base = OTHER; note = thymine
  modified_base 77: mod_base = OTHER; note = thymine
  modified_base 80: mod_base = OTHER; note = thymine
  modified_base 86: mod_base = OTHER; note = thymine
  modified_base 107: mod_base = OTHER; note = thymine
  modified_base 113: mod_base = OTHER; note = thymine
  modified_base 116: mod_base = OTHER; note = thymine
  modified_base 122: mod_base = OTHER; note = thymine
  modified_base 128: mod_base = OTHER; note = thymine
  modified_base 134: mod_base = OTHER; note = thymine
  modified_base 136..137: mod_base = OTHER; note = thymine
  modified_base 152: mod_base = OTHER; note = thymine
  modified_base 169: mod_base = OTHER; note = thymine
  modified_base 173: mod_base = OTHER; note = thymine
  modified_base 179: mod_base = OTHER; note = thymine
  modified_base 191: mod_base = OTHER; note = thymine
  modified_base 199: mod_base = OTHER; note = thymine
  modified_base 203: mod_base = OTHER; note = thymine
  modified_base 212: mod_base = OTHER; note = thymine
  modified_base 236: mod_base = OTHER; note = thymine
  modified_base 239: mod_base = OTHER; note = thymine
  modified_base 254: mod_base = OTHER; note = thymine
  modified_base 257: mod_base = OTHER; note = thymine
  modified_base 272: mod_base = OTHER; note = thymine
  modified_base 275: mod_base = OTHER; note = thymine
  modified_base 289..290: mod_base = OTHER; note = thymine
  modified_base 305: mod_base = OTHER; note = thymine
  modified_base 308: mod_base = OTHER; note = thymine
  modified_base 313: mod_base = OTHER; note = thymine
  modified_base 317: mod_base = OTHER; note = thymine
  modified_base 331: mod_base = OTHER; note = thymine
  modified_base 338: mod_base = OTHER; note = thymine
  modified_base 353: mod_base = OTHER; note = thymine
  modified_base 365: mod_base = OTHER; note = thymine
  modified_base 374: mod_base = OTHER; note = thymine
  modified_base 379: mod_base = OTHER; note = thymine
  modified_base 382: mod_base = OTHER; note = thymine
  modified_base 389: mod_base = OTHER; note = thymine
  modified_base 392: mod_base = OTHER; note = thymine
  modified_base 395: mod_base = OTHER; note = thymine
  modified_base 401: mod_base = OTHER; note = thymine
  modified_base 404: mod_base = OTHER; note = thymine
  modified_base 418: mod_base = OTHER; note = thymine
  modified_base 422: mod_base = OTHER; note = thymine
  modified_base 424: mod_base = OTHER; note = thymine
  modified_base 464: mod_base = OTHER; note = thymine
  modified_base 473: mod_base = OTHER; note = thymine
  modified_base 476: mod_base = OTHER; note = thymine
  modified_base 485: mod_base = OTHER; note = thymine
  modified_base 506: mod_base = OTHER; note = thymine
  modified_base 520..521: mod_base = OTHER; note = thymine
  modified_base 539: mod_base = OTHER; note = thymine
  modified_base 545: mod_base = OTHER; note = thymine
  modified_base 553..554: mod_base = OTHER; note = thymine
  modified_base 565: mod_base = OTHER; note = thymine
  modified_base 575: mod_base = OTHER; note = thymine
  modified_base 589: mod_base = OTHER; note = thymine
  modified_base 595: mod_base = OTHER; note = thymine
  modified_base 598: mod_base = OTHER; note = thymine
  modified_base 607..608: mod_base = OTHER; note = thymine
  modified_base 610: mod_base = OTHER; note = thymine
  modified_base 623: mod_base = OTHER; note = thymine
  modified_base 635: mod_base = OTHER; note = thymine
  modified_base 638: mod_base = OTHER; note = thymine
  modified_base 641: mod_base = OTHER; note = thymine
  modified_base 644: mod_base = OTHER; note = thymine
  modified_base 646..647: mod_base = OTHER; note = thymine
  modified_base 664..665: mod_base = OTHER; note = thymine
  modified_base 680: mod_base = OTHER; note = thymine
  modified_base 682: mod_base = OTHER; note = thymine
  modified_base 692: mod_base = OTHER; note = thymine
  modified_base 704: mod_base = OTHER; note = thymine
  modified_base 713: mod_base = OTHER; note = thymine
  modified_base 716: mod_base = OTHER; note = thymine
  modified_base 719: mod_base = OTHER; note = thymine
  modified_base 737: mod_base = OTHER; note = thymine
  modified_base 739: mod_base = OTHER; note = thymine
  modified_base 752: mod_base = OTHER; note = thymine
  modified_base 761: mod_base = OTHER; note = thymine
  modified_base 764: mod_base = OTHER; note = thymine
  modified_base 772: mod_base = OTHER; note = thymine
  modified_base 778..779: mod_base = OTHER; note = thymine
  modified_base 814: mod_base = OTHER; note = thymine
  modified_base 829..830: mod_base = OTHER; note = thymine
  modified_base 833: mod_base = OTHER; note = thymine
  modified_base 835: mod_base = OTHER; note = thymine
  modified_base 839: mod_base = OTHER; note = thymine
  modified_base 848: mod_base = OTHER; note = thymine
  modified_base 857: mod_base = OTHER; note = thymine
  modified_base 863: mod_base = OTHER; note = thymine
  modified_base 866: mod_base = OTHER; note = thymine
  modified_base 877: mod_base = OTHER; note = thymine
  modified_base 890: mod_base = OTHER; note = thymine
  modified_base 914: mod_base = OTHER; note = thymine
  modified_base 917: mod_base = OTHER; note = thymine
  modified_base 928: mod_base = OTHER; note = thymine
  modified_base 937: mod_base = OTHER; note = thymine
  modified_base 944: mod_base = OTHER; note = thymine
  modified_base 949: mod_base = OTHER; note = thymine
  modified_base 968: mod_base = OTHER; note = thymine
  modified_base 971: mod_base = OTHER; note = thymine
  modified_base 977: mod_base = OTHER; note = thymine
  modified_base 991..992: mod_base = OTHER; note = thymine
  modified_base 994..995: mod_base = OTHER; note = thymine
  modified_base 1004: mod_base = OTHER; note = thymine
  modified_base 1009: mod_base = OTHER; note = thymine
  modified_base 1033: mod_base = OTHER; note = thymine
  modified_base 1040: mod_base = OTHER; note = thymine
  modified_base 1043: mod_base = OTHER; note = thymine
  modified_base 1049: mod_base = OTHER; note = thymine
  modified_base 1057: mod_base = OTHER; note = thymine
  modified_base 1067: mod_base = OTHER; note = thymine
  modified_base 1069: mod_base = OTHER; note = thymine
  modified_base 1079: mod_base = OTHER; note = thymine
  modified_base 1094: mod_base = OTHER; note = thymine
  modified_base 1108: mod_base = OTHER; note = thymine
  modified_base 1115: mod_base = OTHER; note = thymine
  modified_base 1121: mod_base = OTHER; note = thymine
  modified_base 1123: mod_base = OTHER; note = thymine
  modified_base 1133: mod_base = OTHER; note = thymine
  modified_base 1145: mod_base = OTHER; note = thymine
  modified_base 1156..1157: mod_base = OTHER; note = thymine
  modified_base 1159: mod_base = OTHER; note = thymine
  modified_base 1163: mod_base = OTHER; note = thymine
  modified_base 1165..1166: mod_base = OTHER; note = thymine
  modified_base 1184: mod_base = OTHER; note = thymine
  modified_base 1196: mod_base = OTHER; note = thymine
  modified_base 1208: mod_base = OTHER; note = thymine
  modified_base 1220: mod_base = OTHER; note = thymine
  modified_base 1223: mod_base = OTHER; note = thymine
  modified_base 1232: mod_base = OTHER; note = thymine
  modified_base 1235: mod_base = OTHER; note = thymine
  modified_base 1244: mod_base = OTHER; note = thymine
  modified_base 1246: mod_base = OTHER; note = thymine
  modified_base 1249..1250: mod_base = OTHER; note = thymine
  modified_base 1258..1259: mod_base = OTHER; note = thymine
  modified_base 1262: mod_base = OTHER; note = thymine
  modified_base 1268: mod_base = OTHER; note = thymine
  modified_base 1270: mod_base = OTHER; note = thymine
  modified_base 1274: mod_base = OTHER; note = thymine
  modified_base 1283: mod_base = OTHER; note = thymine
  modified_base 1292: mod_base = OTHER; note = thymine
  modified_base 1295: mod_base = OTHER; note = thymine
  modified_base 1301: mod_base = OTHER; note = thymine
  modified_base 1304: mod_base = OTHER; note = thymine
  modified_base 1321: mod_base = OTHER; note = thymine
  modified_base 1333: mod_base = OTHER; note = thymine
  modified_base 1343: mod_base = OTHER; note = thymine
  modified_base 1345: mod_base = OTHER; note = thymine
  modified_base 1357: mod_base = OTHER; note = thymine
  modified_base 1385: mod_base = OTHER; note = thymine
  modified_base 1387: mod_base = OTHER; note = thymine
  modified_base 1391: mod_base = OTHER; note = thymine
  modified_base 1400: mod_base = OTHER; note = thymine
  modified_base 1415: mod_base = OTHER; note = thymine
  modified_base 1427: mod_base = OTHER; note = thymine
  modified_base 1430: mod_base = OTHER; note = thymine
  modified_base 1433: mod_base = OTHER; note = thymine
  modified_base 1442: mod_base = OTHER; note = thymine
  modified_base 1444: mod_base = OTHER; note = thymine
  modified_base 1460: mod_base = OTHER; note = thymine
  modified_base 1463: mod_base = OTHER; note = thymine
  modified_base 1472: mod_base = OTHER; note = thymine
  modified_base 1475: mod_base = OTHER; note = thymine
  modified_base 1483: mod_base = OTHER; note = thymine
  modified_base 1489: mod_base = OTHER; note = thymine
  modified_base 1502: mod_base = OTHER; note = thymine
  modified_base 1508: mod_base = OTHER; note = thymine
  modified_base 1526: mod_base = OTHER; note = thymine
  modified_base 1534: mod_base = OTHER; note = thymine
  modified_base 1537..1538: mod_base = OTHER; note = thymine
  modified_base 1556: mod_base = OTHER; note = thymine
  modified_base 1609..1610: mod_base = OTHER; note = thymine
  modified_base 1618: mod_base = OTHER; note = thymine
  modified_base 1621..1622: mod_base = OTHER; note = thymine
  modified_base 1630..1631: mod_base = OTHER; note = thymine
  modified_base 1634: mod_base = OTHER; note = thymine
  modified_base 1648: mod_base = OTHER; note = thymine
  modified_base 1658: mod_base = OTHER; note = thymine
  modified_base 1661: mod_base = OTHER; note = thymine
  modified_base 1667: mod_base = OTHER; note = thymine
  modified_base 1673: mod_base = OTHER; note = thymine
  modified_base 1675: mod_base = OTHER; note = thymine
  modified_base 1696: mod_base = OTHER; note = thymine
  modified_base 1700: mod_base = OTHER; note = thymine
  modified_base 1702: mod_base = OTHER; note = thymine
  modified_base 1705: mod_base = OTHER; note = thymine
  modified_base 1718: mod_base = OTHER; note = thymine
  modified_base 1724: mod_base = OTHER; note = thymine
  modified_base 1733: mod_base = OTHER; note = thymine
  modified_base 1747: mod_base = OTHER; note = thymine
  modified_base 1751: mod_base = OTHER; note = thymine
  modified_base 1757: mod_base = OTHER; note = thymine
  modified_base 1769: mod_base = OTHER; note = thymine
  modified_base 1774..1775: mod_base = OTHER; note = thymine
  modified_base 1777: mod_base = OTHER; note = thymine
  modified_base 1786: mod_base = OTHER; note = thymine
  modified_base 1795: mod_base = OTHER; note = thymine
  modified_base 1798..1799: mod_base = OTHER; note = thymine
  modified_base 1811: mod_base = OTHER; note = thymine
  modified_base 1814: mod_base = OTHER; note = thymine
  modified_base 1817: mod_base = OTHER; note = thymine
  modified_base 1820: mod_base = OTHER; note = thymine
  modified_base 1825: mod_base = OTHER; note = thymine
  modified_base 1858: mod_base = OTHER; note = thymine
  modified_base 1864: mod_base = OTHER; note = thymine
  modified_base 1867..1868: mod_base = OTHER; note = thymine
  modified_base 1885: mod_base = OTHER; note = thymine
  modified_base 1894: mod_base = OTHER; note = thymine
  modified_base 1903..1904: mod_base = OTHER; note = thymine
  modified_base 1916: mod_base = OTHER; note = thymine
  modified_base 1924: mod_base = OTHER; note = thymine
  modified_base 1930..1931: mod_base = OTHER; note = thymine
  modified_base 1939: mod_base = OTHER; note = thymine
  modified_base 1955: mod_base = OTHER; note = thymine
  modified_base 1958: mod_base = OTHER; note = thymine
  modified_base 1961: mod_base = OTHER; note = thymine
  modified_base 1969..1970: mod_base = OTHER; note = thymine
  modified_base 1984..1985: mod_base = OTHER; note = thymine
  modified_base 2000: mod_base = OTHER; note = thymine
  modified_base 2014: mod_base = OTHER; note = thymine
  modified_base 2018: mod_base = OTHER; note = thymine
  modified_base 2026..2027: mod_base = OTHER; note = thymine
  modified_base 2030: mod_base = OTHER; note = thymine
  modified_base 2032: mod_base = OTHER; note = thymine
  modified_base 2038..2039: mod_base = OTHER; note = thymine
  modified_base 2042: mod_base = OTHER; note = thymine
  modified_base 2054: mod_base = OTHER; note = thymine
  modified_base 2060: mod_base = OTHER; note = thymine
  modified_base 2084: mod_base = OTHER; note = thymine
  modified_base 2086..2087: mod_base = OTHER; note = thymine
  modified_base 2092: mod_base = OTHER; note = thymine
  modified_base 2105: mod_base = OTHER; note = thymine
  modified_base 2114: mod_base = OTHER; note = thymine
  modified_base 2117: mod_base = OTHER; note = thymine
  modified_base 2125..2126: mod_base = OTHER; note = thymine
  modified_base 2128: mod_base = OTHER; note = thymine
  modified_base 2135: mod_base = OTHER; note = thymine
  modified_base 2144: mod_base = OTHER; note = thymine
  modified_base 2174: mod_base = OTHER; note = thymine
  modified_base 2183: mod_base = OTHER; note = thymine
  modified_base 2186: mod_base = OTHER; note = thymine
  modified_base 2189: mod_base = OTHER; note = thymine
  modified_base 2194: mod_base = OTHER; note = thymine
  modified_base 2197: mod_base = OTHER; note = thymine
  modified_base 2204: mod_base = OTHER; note = thymine
  modified_base 2210: mod_base = OTHER; note = thymine
  modified_base 2222: mod_base = OTHER; note = thymine
  modified_base 2230..2231: mod_base = OTHER; note = thymine
  modified_base 2234: mod_base = OTHER; note = thymine
  modified_base 2239: mod_base = OTHER; note = thymine
  modified_base 2249: mod_base = OTHER; note = thymine
  modified_base 2257..2258: mod_base = OTHER; note = thymine
  modified_base 2273: mod_base = OTHER; note = thymine
  modified_base 2294: mod_base = OTHER; note = thymine
  modified_base 2297: mod_base = OTHER; note = thymine
  modified_base 2314..2315: mod_base = OTHER; note = thymine
  modified_base 2326: mod_base = OTHER; note = thymine
  modified_base 2332..2333: mod_base = OTHER; note = thymine
  modified_base 2335..2336: mod_base = OTHER; note = thymine
  modified_base 2348: mod_base = OTHER; note = thymine
  modified_base 2351: mod_base = OTHER; note = thymine
  modified_base 2354: mod_base = OTHER; note = thymine
  modified_base 2360: mod_base = OTHER; note = thymine
  modified_base 2362..2363: mod_base = OTHER; note = thymine
  modified_base 2389..2390: mod_base = OTHER; note = thymine
  modified_base 2408: mod_base = OTHER; note = thymine
  modified_base 2417: mod_base = OTHER; note = thymine
  modified_base 2426: mod_base = OTHER; note = thymine
  modified_base 2429: mod_base = OTHER; note = thymine
  modified_base 2441: mod_base = OTHER; note = thymine
  modified_base 2443: mod_base = OTHER; note = thymine
  modified_base 2446: mod_base = OTHER; note = thymine
  modified_base 2462: mod_base = OTHER; note = thymine
  modified_base 2470: mod_base = OTHER; note = thymine
  modified_base 2474: mod_base = OTHER; note = thymine
  modified_base 2483: mod_base = OTHER; note = thymine
  modified_base 2485..2486: mod_base = OTHER; note = thymine
  modified_base 2489: mod_base = OTHER; note = thymine
  modified_base 2491: mod_base = OTHER; note = thymine
  modified_base 2513: mod_base = OTHER; note = thymine
  modified_base 2515: mod_base = OTHER; note = thymine
  modified_base 2531: mod_base = OTHER; note = thymine
  modified_base 2540: mod_base = OTHER; note = thymine
  modified_base 2545: mod_base = OTHER; note = thymine
  modified_base 2558: mod_base = OTHER; note = thymine
  modified_base 2570: mod_base = OTHER; note = thymine
  modified_base 2572: mod_base = OTHER; note = thymine
  modified_base 2576: mod_base = OTHER; note = thymine
  modified_base 2579: mod_base = OTHER; note = thymine
  modified_base 2585: mod_base = OTHER; note = thymine
  modified_base 2591: mod_base = OTHER; note = thymine
  modified_base 2600: mod_base = OTHER; note = thymine
  modified_base 2606: mod_base = OTHER; note = thymine
  modified_base 2615: mod_base = OTHER; note = thymine
  modified_base 2624: mod_base = OTHER; note = thymine
  modified_base 2627: mod_base = OTHER; note = thymine
  modified_base 2651: mod_base = OTHER; note = thymine
  modified_base 2653: mod_base = OTHER; note = thymine
  modified_base 2663: mod_base = OTHER; note = thymine
  modified_base 2675: mod_base = OTHER; note = thymine
  modified_base 2707..2708: mod_base = OTHER; note = thymine
  modified_base 2719..2720: mod_base = OTHER; note = thymine
  modified_base 2722: mod_base = OTHER; note = thymine
  modified_base 2728: mod_base = OTHER; note = thymine
  modified_base 2759: mod_base = OTHER; note = thymine
  modified_base 2768: mod_base = OTHER; note = thymine
  modified_base 2774: mod_base = OTHER; note = thymine
  modified_base 2783: mod_base = OTHER; note = thymine
  modified_base 2798: mod_base = OTHER; note = thymine
  modified_base 2800: mod_base = OTHER; note = thymine
  modified_base 2804: mod_base = OTHER; note = thymine
  modified_base 2822: mod_base = OTHER; note = thymine
  modified_base 2840: mod_base = OTHER; note = thymine
  modified_base 2843: mod_base = OTHER; note = thymine
  modified_base 2849: mod_base = OTHER; note = thymine
  modified_base 2855: mod_base = OTHER; note = thymine
  modified_base 2857..2858: mod_base = OTHER; note = thymine
  modified_base 2875: mod_base = OTHER; note = thymine
  modified_base 2878: mod_base = OTHER; note = thymine
  modified_base 2882: mod_base = OTHER; note = thymine
  modified_base 2885: mod_base = OTHER; note = thymine
  modified_base 2891: mod_base = OTHER; note = thymine
  modified_base 2893: mod_base = OTHER; note = thymine
  modified_base 2896: mod_base = OTHER; note = thymine
  modified_base 2899: mod_base = OTHER; note = thymine
  modified_base 2906: mod_base = OTHER; note = thymine
  modified_base 2918: mod_base = OTHER; note = thymine
  modified_base 2921: mod_base = OTHER; note = thymine
  modified_base 2936: mod_base = OTHER; note = thymine
  modified_base 2939: mod_base = OTHER; note = thymine
  modified_base 2962: mod_base = OTHER; note = thymine
  modified_base 2969: mod_base = OTHER; note = thymine
  modified_base 2972: mod_base = OTHER; note = thymine
  modified_base 2980: mod_base = OTHER; note = thymine
  modified_base 2983..2984: mod_base = OTHER; note = thymine
  modified_base 2989..2990: mod_base = OTHER; note = thymine
  modified_base 2995..2996: mod_base = OTHER; note = thymine
  modified_base 2998: mod_base = OTHER; note = thymine
  modified_base 3002: mod_base = OTHER; note = thymine
  modified_base 3017: mod_base = OTHER; note = thymine
  modified_base 3020: mod_base = OTHER; note = thymine
  modified_base 3026: mod_base = OTHER; note = thymine
  modified_base 3029: mod_base = OTHER; note = thymine
  modified_base 3047: mod_base = OTHER; note = thymine
  modified_base 3049..3050: mod_base = OTHER; note = thymine
  modified_base 3055: mod_base = OTHER; note = thymine
  modified_base 3058..3059: mod_base = OTHER; note = thymine
  modified_base 3064: mod_base = OTHER; note = thymine
  modified_base 3067: mod_base = OTHER; note = thymine
  modified_base 3089: mod_base = OTHER; note = thymine
  modified_base 3095: mod_base = OTHER; note = thymine
  modified_base 3101: mod_base = OTHER; note = thymine
  modified_base 3110: mod_base = OTHER; note = thymine
  modified_base 3122: mod_base = OTHER; note = thymine
  modified_base 3137: mod_base = OTHER; note = thymine
  modified_base 3140: mod_base = OTHER; note = thymine
  modified_base 3149: mod_base = OTHER; note = thymine
  modified_base 3155: mod_base = OTHER; note = thymine
  modified_base 3167: mod_base = OTHER; note = thymine
  modified_base 3169: mod_base = OTHER; note = thymine
  modified_base 3172..3173: mod_base = OTHER; note = thymine
  modified_base 3181: mod_base = OTHER; note = thymine
  modified_base 3188: mod_base = OTHER; note = thymine
  modified_base 3197: mod_base = OTHER; note = thymine
  modified_base 3209: mod_base = OTHER; note = thymine
  modified_base 3217: mod_base = OTHER; note = thymine
  modified_base 3224: mod_base = OTHER; note = thymine
  modified_base 3242: mod_base = OTHER; note = thymine
  misc_feature 1..3249: note = Synthetic
  source 1..3249: mol_type = other RNA
atggccgccttcaagcccaactccatcaactacatcctgggcctggacatcggcatcgcctccgtgggctgggccatggtggagatcgacgaggaggagaaccccatccggctgatcgacctgggcgtgcgggtgttcgagcgggccgaggtgcccaagaccggcgactccctggccatggcccggcggctggcccggtccgtgcggcggctgacccggcggcgggcccaccggctgctgcggacccggcggctgctgaagcgggagggcgtgctgcaggccgccaacttcgacgagaacggcctgatcaagtccctgcccaacaccccctggcagctgcgggccgccgccctggaccggaagctgacccccctggagtggtccgccgtgctgctgcacctgatcaagcaccggggctacctgtcccagcggaagaacgagggcgagaccgccgacaaggagctgggcgccctgctgaagggcgtggccggcaacgcccacgccctgcagaccggcgacttccggacccccgccgagctggccctgaacaagttcgagaaggagtccggccacatccggaaccagcggtccgactactcccacaccttctcccggaaggacctgcaggccgagctgatcctgctgttcgagaagcagaaggagttcggcaacccccacgtgtccggcggcctgaaggagggcatcgagaccctgctgatgacccagcggcccgccctgtccggcgacgccgtgcagaagatgctgggccactgcaccttcgagcccgccgagcccaaggccgccaagaacacctacaccgccgagcggttcatctggctgaccaagctgaacaacctgcggatcctggagcagggctccgagcggcccctgaccgacaccgagcgggccaccctgatggacgagccctaccggaagtccaagctgacctacgcccaggcccggaagctgctgggcctggaggacaccgccttcttcaagggcctgcggtacggcaaggacaacgccgaggcctccaccctgatggagatgaaggcctaccacgccatctcccgggccctggagaaggagggcctgaaggacaagaagtcccccctgaacctgtcccccgagctgcaggacgagatcggcaccgccttctccctgttcaagaccgacgaggacatcaccggccggctgaaggaccggatccagcccgagatcctggaggccctgctgaagcacatctccttcgacaagttcgtgcagatctccctgaaggccctgcggcggatcgtgcccctgatggagcagggcaagcggtacgacgaggcctgcgccgagatctacggcgaccactacggcaagaagaacaccgaggagaagatctacctgccccccatccccgccgacgagatccggaaccccgtggtgctgcgggccctgtcccaggcccggaaggtgatcaacggcgtggtgcggcggtacggctcccccgcccggatccacatcgagaccgcccgggaggtgggcaagtccttcaaggaccggaaggagatcgagaagcggcaggaggagaaccggaaggaccgggagaaggccgccgccaagttccgggagtacttccccaacttcgtgggcgagcccaagtccaaggacatcctgaagctgcggctgtacgagcagcagcacggcaagtgcctgtactccggcaaggagatcaacctgggccggctgaacgagaagggctacgtggagatcgaccacgccctgcccttctcccggacctgggacgactccttcaacaacaaggtgctggtgctgggctccgagaaccagaacaagggcaaccagaccccctacgagtacttcaacggcaaggacaactcccgggagtggcaggagttcaaggcccgggtggagacctcccggttcccccggtccaagaagcagcggatcctgctgcagaagttcgacgaggacggcttcaaggagcggaacctgaacgacacccggtacgtgaaccggttcctgtgccagttcgtggccgaccggatgcggctgaccggcaagggcaagaagcgggtgttcgcctccaacggccagatcaccaacctgctgcggggcttctggggcctgcggaaggtgcgggccgagaacgaccggcaccacgccctggacgccgtggtggtggcctgctccaccgtggccatgcagcagaagatcacccggttcgtgcggtacaaggagatgaacgccttcgacggcaagaccatcgacaaggagaccggcgaggtgctgcaccagaagacccacttcccccagccctgggagttcttcgcccaggaggtgatgatccgggtgttcggcaagcccgacggcaagcccgagttcgaggaggccgacaccctggagaagctgcggaccctgctggccgagaagctgtcctcccggcccgaggccgtgcacgagtacgtgacccccctgttcgtgtcccgggcccccaaccggaagatgtccggccagggccacatggagaccgtgaagtccgccaagcggctggacgagggcgtgtccgtgctgcgggtgcccctgacccagctgaagctgaaggacctggagaagatggtgaaccgggagcgggagcccaagctgtacgaggccctgaaggcccggctggaggcccacaaggacgaccccgccaaggccttcgccgagcccttctacaagtacgacaaggccggcaaccggacccagcaggtgaaggccgtgcgggtggagcaggtgcagaagaccggcgtgtgggtgcggaaccacaacggcatcgccgacaacgccaccatggtgcgggtggacgtgttcgagaagggcgacaagtactacctggtgcccatctactcctggcaggtggccaagggcatcctgcccgaccgggccgtggtgcagggcaaggacgaggaggactggcagctgatcgacgactccttcaacttcaagttctccctgcaccccaacgacctggtggaggtgatcaccaagaaggcccggatgttcggctacttcgcctcctgccaccggggcaccggcaacatcaacatccggatccacgacctggaccacaagatcggcaagaacggcatcctggagggcatcggcgtgaagaccgccctgtccttccagaagtaccagatcgacgagctgggcaaggagatccggccctgccggctgaagaagcggccccccgtgcggtga

SEQ ID NO: 226 - RNA, 3249 nt, synthetic construct
  modified_base 2: mod_base = OTHER; note = thymine
  modified_base 10..11: mod_base = OTHER; note = thymine
  modified_base 22: mod_base = OTHER; note = thymine
  modified_base 26: mod_base = OTHER; note = thymine
  modified_base 31: mod_base = OTHER; note = thymine
  modified_base 35: mod_base = OTHER; note = thymine
  modified_base 38: mod_base = OTHER; note = thymine
  modified_base 44: mod_base = OTHER; note = thymine
  modified_base 50: mod_base = OTHER; note = thymine
  modified_base 56: mod_base = OTHER; note = thymine
  modified_base 61: mod_base = OTHER; note = thymine
  modified_base 65: mod_base = OTHER; note = thymine
  modified_base 70: mod_base = OTHER; note = thymine
  modified_base 77: mod_base = OTHER; note = thymine
  modified_base 80: mod_base = OTHER; note = thymine
  modified_base 86: mod_base = OTHER; note = thymine
  modified_base 107: mod_base = OTHER; note = thymine
  modified_base 113: mod_base = OTHER; note = thymine
  modified_base 116: mod_base = OTHER; note = thymine
  modified_base 122: mod_base = OTHER; note = thymine
  modified_base 128: mod_base = OTHER; note = thymine
  modified_base 134: mod_base = OTHER; note = thymine
  modified_base 136..137: mod_base = OTHER; note = thymine
  modified_base 152: mod_base = OTHER; note = thymine
  modified_base 169: mod_base = OTHER; note = thymine
  modified_base 173: mod_base = OTHER; note = thymine
  modified_base 179: mod_base = OTHER; note = thymine
  modified_base 191: mod_base = OTHER; note = thymine
  modified_base 199: mod_base = OTHER; note = thymine
  modified_base 203: mod_base = OTHER; note = thymine
  modified_base 212: mod_base = OTHER; note = thymine
  modified_base 236: mod_base = OTHER; note = thymine
  modified_base 239: mod_base = OTHER; note = thymine
  modified_base 254: mod_base = OTHER; note = thymine
  modified_base 257: mod_base = OTHER; note = thymine
  modified_base 272: mod_base = OTHER; note = thymine
  modified_base 275: mod_base = OTHER; note = thymine
  modified_base 289..290: mod_base = OTHER; note = thymine
  modified_base 305: mod_base = OTHER; note = thymine
  modified_base 308: mod_base = OTHER; note = thymine
  modified_base 313: mod_base = OTHER; note = thymine
  modified_base 317: mod_base = OTHER; note = thymine
  modified_base 331: mod_base = OTHER; note = thymine
  modified_base 338: mod_base = OTHER; note = thymine
  modified_base 353: mod_base = OTHER; note = thymine
  modified_base 365: mod_base = OTHER; note = thymine
  modified_base 374: mod_base = OTHER; note = thymine
  modified_base 379: mod_base = OTHER; note = thymine
  modified_base 382: mod_base = OTHER; note = thymine
  modified_base 389: mod_base = OTHER; note = thymine
  modified_base 392: mod_base = OTHER; note = thymine
  modified_base 395: mod_base = OTHER; note = thymine
  modified_base 401: mod_base = OTHER; note = thymine
  modified_base 404: mod_base = OTHER; note = thymine
  modified_base 418: mod_base = OTHER; note = thymine
  modified_base 422: mod_base = OTHER; note = thymine
  modified_base 424: mod_base = OTHER; note = thymine
  modified_base 464: mod_base = OTHER; note = thymine
  modified_base 473: mod_base = OTHER; note = thymine
  modified_base 476: mod_base = OTHER; note = thymine
  modified_base 485: mod_base = OTHER; note = thymine
  modified_base 506: mod_base = OTHER; note = thymine
  modified_base 520..521: mod_base = OTHER; note = thymine
  modified_base 539: mod_base = OTHER; note = thymine
  modified_base 545: mod_base = OTHER; note = thymine
  modified_base 553..554: mod_base = OTHER; note = thymine
  modified_base 565: mod_base = OTHER; note = thymine
  modified_base 575: mod_base = OTHER; note = thymine
  modified_base 589: mod_base = OTHER; note = thymine
  modified_base 595: mod_base = OTHER; note = thymine
  modified_base 598: mod_base = OTHER; note = thymine
  modified_base 607..608: mod_base = OTHER; note = thymine
  modified_base 610: mod_base = OTHER; note = thymine
  modified_base 623: mod_base = OTHER; note = thymine
  modified_base 635: mod_base = OTHER; note = thymine
  modified_base 638: mod_base = OTHER; note = thymine
  modified_base 641: mod_base = OTHER; note = thymine
  modified_base 644: mod_base = OTHER; note = thymine
  modified_base 646..647: mod_base = OTHER; note = thymine
  modified_base 664..665: mod_base = OTHER; note = thymine
  modified_base 680: mod_base = OTHER; note = thymine
  modified_base 682: mod_base = OTHER; note = thymine
  modified_base 692: mod_base = OTHER; note = thymine
  modified_base 704: mod_base = OTHER; note = thymine
  modified_base 713: mod_base = OTHER; note = thymine
  modified_base 716: mod_base = OTHER; note = thymine
  modified_base 719: mod_base = OTHER; note = thymine
  modified_base 737: mod_base = OTHER; note = thymine
  modified_base 739: mod_base = OTHER; note = thymine
  modified_base 752: mod_base = OTHER; note = thymine
  modified_base 761: mod_base = OTHER; note = thymine
  modified_base 764: mod_base = OTHER; note = thymine
  modified_base 772: mod_base = OTHER; note = thymine
  modified_base 778..779: mod_base = OTHER; note = thymine
  modified_base 814: mod_base = OTHER; note = thymine
  modified_base 829..830: mod_base = OTHER; note = thymine
  modified_base 833: mod_base = OTHER; note = thymine
  modified_base 835: mod_base = OTHER; note = thymine
  modified_base 839: mod_base = OTHER; note = thymine
  modified_base 848: mod_base = OTHER; note = thymine
  modified_base 857: mod_base = OTHER; note = thymine
  modified_base 863: mod_base = OTHER; note = thymine
  modified_base 866: mod_base = OTHER; note = thymine
  modified_base 877: mod_base = OTHER; note = thymine
  modified_base 890: mod_base = OTHER; note = thymine
  modified_base 914: mod_base = OTHER; note = thymine
  modified_base 917: mod_base = OTHER; note = thymine
  modified_base 928: mod_base = OTHER; note = thymine
  modified_base 937: mod_base = OTHER; note = thymine
  modified_base 944: mod_base = OTHER; note = thymine
  modified_base 949: mod_base = OTHER; note = thymine
  modified_base 968: mod_base = OTHER; note = thymine
  modified_base 971: mod_base = OTHER; note = thymine
  modified_base 977: mod_base = OTHER; note = thymine
  modified_base 991..992: mod_base = OTHER; note = thymine
  modified_base 994..995: mod_base = OTHER; note = thymine
  modified_base 1004: mod_base = OTHER; note = thymine
  modified_base 1009: mod_base = OTHER; note = thymine
  modified_base 1033: mod_base = OTHER; note = thymine
  modified_base 1040: mod_base = OTHER; note = thymine
  modified_base 1043: mod_base = OTHER; note = thymine
  modified_base 1049: mod_base = OTHER; note = thymine
  modified_base 1057: mod_base = OTHER; note = thymine
  modified_base 1067: mod_base = OTHER; note = thymine
  modified_base 1069: mod_base = OTHER; note = thymine
  modified_base 1079: mod_base = OTHER; note = thymine
  modified_base 1094: mod_base = OTHER; note = thymine
  modified_base 1108: mod_base = OTHER; note = thymine
  modified_base 1115: mod_base = OTHER; note = thymine
  modified_base 1121: mod_base = OTHER; note = thymine
  modified_base 1123: mod_base = OTHER; note = thymine
  modified_base 1133: mod_base = OTHER; note = thymine
  modified_base 1145: mod_base = OTHER; note = thymine
  modified_base 1156..1157: mod_base = OTHER; note = thymine
  modified_base 1159: mod_base = OTHER; note = thymine
  modified_base 1163: mod_base = OTHER; note = thymine
  modified_base 1165..1166: mod_base = OTHER; note = thymine
  modified_base 1184: mod_base = OTHER; note = thymine
  modified_base 1196: mod_base = OTHER; note = thymine
  modified_base 1208: mod_base = OTHER; note = thymine
  modified_base 1220: mod_base = OTHER; note = thymine
  modified_base 1223: mod_base = OTHER; note = thymine
  modified_base 1232: mod_base = OTHER; note = thymine
  modified_base 1235: mod_base = OTHER; note = thymine
  modified_base 1244: mod_base = OTHER; note = thymine
  modified_base 1246: mod_base = OTHER; note = thymine
  modified_base 1249..1250: mod_base = OTHER; note = thymine
  modified_base 1258..1259: mod_base = OTHER; note = thymine
  modified_base 1262: mod_base = OTHER; note = thymine
  modified_base 1268: mod_base = OTHER; note = thymine
  modified_base 1270: mod_base = OTHER; note = thymine
  modified_base 1274: mod_base = OTHER; note = thymine
  modified_base 1283: mod_base = OTHER; note = thymine
  modified_base 1292: mod_base = OTHER; note = thymine
  modified_base 1295: mod_base = OTHER; note = thymine
  modified_base 1301: mod_base = OTHER; note = thymine
  modified_base 1304: mod_base = OTHER; note = thymine
  modified_base 1321: mod_base = OTHER; note = thymine
  modified_base 1333: mod_base = OTHER; note = thymine
  modified_base 1343: mod_base = OTHER; note = thymine
  modified_base 1345: mod_base = OTHER; note = thymine
  modified_base 1357: mod_base = OTHER; note = thymine
  modified_base 1385: mod_base = OTHER; note = thymine
  modified_base 1387: mod_base = OTHER; note = thymine
  modified_base 1391: mod_base = OTHER; note = thymine
  modified_base 1400: mod_base = OTHER; note = thymine
  modified_base 1415: mod_base = OTHER; note = thymine
  modified_base 1427: mod_base = OTHER; note = thymine
  modified_base 1430: mod_base = OTHER; note = thymine
  modified_base 1433: mod_base = OTHER; note = thymine
  modified_base 1442: mod_base = OTHER; note = thymine
  modified_base 1444: mod_base = OTHER; note = thymine
  modified_base 1460: mod_base = OTHER; note = thymine
  modified_base 1463: mod_base = OTHER; note = thymine
  modified_base 1472: mod_base = OTHER; note = thymine
  modified_base 1475: mod_base = OTHER; note = thymine
  modified_base 1483: mod_base = OTHER; note = thymine
  modified_base 1489: mod_base = OTHER; note = thymine
  modified_base 1502: mod_base = OTHER; note = thymine
  modified_base 1508: mod_base = OTHER; note = thymine
  modified_base 1526: mod_base = OTHER; note = thymine
  modified_base 1534: mod_base = OTHER; note = thymine
  modified_base 1537..1538: mod_base = OTHER; note = thymine
  modified_base 1556: mod_base = OTHER; note = thymine
  modified_base 1609..1610: mod_base = OTHER; note = thymine
  modified_base 1618: mod_base = OTHER; note = thymine
  modified_base 1621..1622: mod_base = OTHER; note = thymine
  modified_base 1630..1631: mod_base = OTHER; note = thymine
  modified_base 1634: mod_base = OTHER; note = thymine
  modified_base 1648: mod_base = OTHER; note = thymine
  modified_base 1658: mod_base = OTHER; note = thymine
  modified_base 1661: mod_base = OTHER; note = thymine
  modified_base 1667: mod_base = OTHER; note = thymine
  modified_base 1673: mod_base = OTHER; note = thymine
  modified_base 1675: mod_base = OTHER; note = thymine
  modified_base 1696: mod_base = OTHER; note = thymine
  modified_base 1700: mod_base = OTHER; note = thymine
  modified_base 1702: mod_base = OTHER; note = thymine
  modified_base 1705: mod_base = OTHER; note = thymine
  modified_base 1718: mod_base = OTHER; note = thymine
  modified_base 1724: mod_base = OTHER; note = thymine
  modified_base 1733: mod_base = OTHER; note = thymine
  modified_base 1747: mod_base = OTHER; note = thymine
  modified_base 1751: mod_base = OTHER; note = thymine
  modified_base 1757: mod_base = OTHER; note = thymine
  modified_base 1769: mod_base = OTHER; note = thymine
  modified_base 1774..1775: mod_base = OTHER; note = thymine
  modified_base 1777: mod_base = OTHER; note = thymine
  modified_base 1786: mod_base = OTHER; note = thymine
  modified_base 1795: mod_base = OTHER; note = thymine
  modified_base 1798..1799: mod_base = OTHER; note = thymine
  modified_base 1811: mod_base = OTHER; note = thymine
  modified_base 1814: mod_base = OTHER; note = thymine
  modified_base 1817: mod_base = OTHER; note = thymine
  modified_base 1820: mod_base = OTHER; note = thymine
  modified_base 1825: mod_base = OTHER; note = thymine
  modified_base 1858: mod_base = OTHER; note = thymine
  modified_base 1864: mod_base = OTHER; note = thymine
  modified_base 1867..1868: mod_base = OTHER; note = thymine
  modified_base 1885: mod_base = OTHER; note = thymine
  modified_base 1894: mod_base = OTHER; note = thymine
  modified_base 1903..1904: mod_base = OTHER; note = thymine
  modified_base 1916: mod_base = OTHER; note = thymine
  modified_base 1924: mod_base = OTHER; note = thymine
  modified_base 1930..1931: mod_base = OTHER; note = thymine
  modified_base 1939: mod_base = OTHER; note = thymine
  modified_base 1955: mod_base = OTHER; note = thymine
  modified_base 1958: mod_base = OTHER; note = thymine
  modified_base 1961: mod_base = OTHER; note = thymine
  modified_base 1969..1970: mod_base = OTHER; note = thymine
  modified_base 1984..1985: mod_base = OTHER; note = thymine
  modified_base 2000: mod_base = OTHER; note = thymine
  modified_base 2014: mod_base = OTHER; note = thymine
  modified_base 2018: mod_base = OTHER; note = thymine
  modified_base 2026..2027: mod_base = OTHER; note = thymine
  modified_base 2030: mod_base = OTHER; note = thymine
  modified_base 2032: mod_base = OTHER; note = thymine
  modified_base 2038..2039: mod_base = OTHER; note = thymine
  modified_base 2042: mod_base = OTHER; note = thymine
  modified_base 2054: mod_base = OTHER; note = thymine
  modified_base 2060: mod_base = OTHER; note = thymine
  modified_base 2084: mod_base = OTHER; note = thymine
  modified_base 2086..2087: mod_base = OTHER; note = thymine
  modified_base 2092: mod_base = OTHER; note = thymine
  modified_base 2105: mod_base = OTHER; note = thymine
  modified_base 2114: mod_base = OTHER; note = thymine
  modified_base 2117: mod_base = OTHER; note = thymine
  modified_base 2125..2126: mod_base = OTHER; note = thymine
  modified_base 2128: mod_base = OTHER; note = thymine
  modified_base 2135: mod_base = OTHER; note = thymine
  modified_base 2144: mod_base = OTHER; note = thymine
  modified_base 2174: mod_base = OTHER; note = thymine
  modified_base 2183: mod_base = OTHER; note = thymine
  modified_base 2186: mod_base = OTHER; note = thymine
  modified_base 2189: mod_base = OTHER; note = thymine
  modified_base 2194: mod_base = OTHER; note = thymine
  modified_base 2197: mod_base = OTHER; note = thymine
  modified_base 2204: mod_base = OTHER; note = thymine
  modified_base 2210: mod_base = OTHER; note = thymine
  modified_base 2222: mod_base = OTHER; note = thymine
  modified_base 2230..2231: mod_base = OTHER; note = thymine
  modified_base 2234: mod_base = OTHER; note = thymine
  modified_base 2239: mod_base = OTHER; note = thymine
  modified_base 2249: mod_base = OTHER; note = thymine
  modified_base 2257..2258: mod_base = OTHER; note = thymine
  modified_base 2273: mod_base = OTHER; note = thymine
  modified_base 2294: mod_base = OTHER; note = thymine
  modified_base 2297: mod_base = OTHER; note = thymine
  modified_base 2314..2315: mod_base = OTHER; note = thymine
  modified_base 2326: mod_base = OTHER; note = thymine
  modified_base 2332..2333: mod_base = OTHER; note = thymine
  modified_base 2335..2336: mod_base = OTHER; note = thymine
  modified_base 2348: mod_base = OTHER; note = thymine
  modified_base 2351: mod_base = OTHER; note = thymine
  modified_base 2354: mod_base = OTHER; note = thymine
  modified_base 2360: mod_base = OTHER; note = thymine
  modified_base 2362..2363: mod_base = OTHER; note = thymine
  modified_base 2389..2390: mod_base = OTHER; note = thymine
  modified_base 2408: mod_base = OTHER; note = thymine
  modified_base 2417: mod_base = OTHER; note = thymine
  modified_base 2426: mod_base = OTHER; note = thymine
  modified_base 2429: mod_base = OTHER; note = thymine
  modified_base 2441: mod_base = OTHER; note = thymine
  modified_base 2443: mod_base = OTHER; note = thymine
  modified_base 2446: mod_base = OTHER; note = thymine
  modified_base 2462: mod_base = OTHER; note = thymine
  modified_base 2470: mod_base = OTHER; note = thymine
  modified_base 2474: mod_base = OTHER; note = thymine
  modified_base 2483: mod_base = OTHER; note = thymine
  modified_base 2485..2486: mod_base = OTHER; note = thymine
  modified_base 2489: mod_base = OTHER; note = thymine
  modified_base 2491: mod_base = OTHER; note = thymine
  modified_base 2513: mod_base = OTHER; note = thymine
  modified_base 2515: mod_base = OTHER; note = thymine
  modified_base 2531: mod_base = OTHER; note = thymine
  modified_base 2540: mod_base = OTHER; note = thymine
  modified_base 2545: mod_base = OTHER; note = thymine
  modified_base 2558: mod_base = OTHER; note = thymine
  modified_base 2570: mod_base = OTHER; note = thymine
  modified_base 2572: mod_base = OTHER; note = thymine
  modified_base 2576: mod_base = OTHER; note = thymine
  modified_base 2579: mod_base = OTHER; note = thymine
  modified_base 2585: mod_base = OTHER; note = thymine
  modified_base 2591: mod_base = OTHER; note = thymine
  modified_base 2600: mod_base = OTHER; note = thymine
  modified_base 2606: mod_base = OTHER; note = thymine
  modified_base 2615: mod_base = OTHER; note = thymine
  modified_base 2624: mod_base = OTHER; note = thymine
  modified_base 2627: mod_base = OTHER; note = thymine
  modified_base 2651: mod_base = OTHER; note = thymine
  modified_base 2653: mod_base = OTHER; note = thymine
  modified_base 2663: mod_base = OTHER; note = thymine
  modified_base 2675: mod_base = OTHER; note = thymine
  modified_base 2707..2708: mod_base = OTHER; note = thymine
  modified_base 2719..2720: mod_base = OTHER; note = thymine
  modified_base 2722: mod_base = OTHER; note = thymine
  modified_base 2728: mod_base = OTHER; note = thymine
  modified_base 2759: mod_base = OTHER; note = thymine
  modified_base 2768: mod_base = OTHER; note = thymine
  modified_base 2774: mod_base = OTHER; note = thymine
  modified_base 2783: mod_base = OTHER; note = thymine
  modified_base 2798: mod_base = OTHER; note = thymine
  modified_base 2800: mod_base = OTHER; note = thymine
  modified_base 2804: mod_base = OTHER; note = thymine
  modified_base 2822: mod_base = OTHER; note = thymine
  modified_base 2840: mod_base = OTHER; note = thymine
  modified_base 2843: mod_base = OTHER; note = thymine
  modified_base 2849: mod_base = OTHER; note = thymine
  modified_base 2855: mod_base = OTHER; note = thymine
  modified_base 2857..2858: mod_base = OTHER; note = thymine
  modified_base 2875: mod_base = OTHER; note = thymine
  modified_base 2878: mod_base = OTHER; note = thymine
  modified_base 2882: mod_base = OTHER; note = thymine
  modified_base 2885: mod_base = OTHER; note = thymine
  modified_base 2891: mod_base = OTHER; note = thymine
  modified_base 2893: mod_base = OTHER; note = thymine
  modified_base 2896: mod_base = OTHER; note = thymine
  modified_base 2899: mod_base = OTHER; note = thymine
  modified_base 2906: mod_base = OTHER; note = thymine
  modified_base 2918: mod_base = OTHER; note = thymine
  modified_base 2921: mod_base = OTHER; note = thymine
  modified_base 2936: mod_base = OTHER; note = thymine
  modified_base 2939: mod_base = OTHER; note = thymine
  modified_base 2962: mod_base = OTHER; note = thymine
  modified_base 2969: mod_base = OTHER; note = thymine
  modified_base 2972: mod_base = OTHER; note = thymine
  modified_base 2980: mod_base = OTHER; note = thymine
  modified_base 2983..2984: mod_base = OTHER; note = thymine
  modified_base 2989..2990: mod_base = OTHER; note = thymine
  modified_base 2995..2996: mod_base = OTHER; note = thymine
  modified_base 2998: mod_base = OTHER; note = thymine
  modified_base 3002: mod_base = OTHER; note = thymine
  modified_base 3017: mod_base = OTHER; note = thymine
  modified_base 3020: mod_base = OTHER; note = thymine
  modified_base 3026: mod_base = OTHER; note = thymine
  modified_base 3029: mod_base = OTHER; note = thymine
  modified_base 3047: mod_base = OTHER; note = thymine
  modified_base 3049..3050: mod_base = OTHER; note = thymine
  modified_base 3055: mod_base = OTHER; note = thymine
  modified_base 3058..3059: mod_base = OTHER; note = thymine
  modified_base 3064: mod_base = OTHER; note = thymine
  modified_base 3067: mod_base = OTHER; note = thymine
  modified_base 3089: mod_base = OTHER; note = thymine
  modified_base 3095: mod_base = OTHER; note = thymine
  modified_base 3101: mod_base = OTHER; note = thymine
  modified_base 3110: mod_base = OTHER; note = thymine
  modified_base 3122: mod_base = OTHER; note = thymine
  modified_base 3137: mod_base = OTHER; note = thymine
  modified_base 3140: mod_base = OTHER; note = thymine
  modified_base 3149: mod_base = OTHER; note = thymine
  modified_base 3155: mod_base = OTHER; note = thymine
  modified_base 3167: mod_base = OTHER; note = thymine
  modified_base 3169: mod_base = OTHER; note = thymine
  modified_base 3172..3173: mod_base = OTHER; note = thymine
  modified_base 3181: mod_base = OTHER; note = thymine
  modified_base 3188: mod_base = OTHER; note = thymine
  modified_base 3197: mod_base = OTHER; note = thymine
  modified_base 3209: mod_base = OTHER; note = thymine
  modified_base 3217: mod_base = OTHER; note = thymine
  modified_base 3224: mod_base = OTHER; note = thymine
  modified_base 3242: mod_base = OTHER; note = thymine
  misc_feature 1..3249: note = Synthetic
  source 1..3249: mol_type = other RNA
atggcagcattcaaaccaaactcaatcaactacatcctaggactagacatcggaatcgcatcagtaggatgagcaatggtagaaatcgacgaagaagaaaacccaatccgactaatcgacctaggagtacgagtattcgaacgagcagaagtaccaaaaacaggagactcactagcaatggcacgacgactagcacgatcagtacgacgactaacacgacgacgagcacaccgactactacgaacacgacgactactaaaacgagaaggagtactacaagcagcaaacttcgacgaaaacggactaatcaaatcactaccaaacacaccatgacaactacgagcagcagcactagaccgaaaactaacaccactagaatgatcagcagtactactacacctaatcaaacaccgaggatacctatcacaacgaaaaaacgaaggagaaacagcagacaaagaactaggagcactactaaaaggagtagcaggaaacgcacacgcactacaaacaggagacttccgaacaccagcagaactagcactaaacaaattcgaaaaagaatcaggacacatccgaaaccaacgatcagactactcacacacattctcacgaaaagacctacaagcagaactaatcctactattcgaaaaacaaaaagaattcggaaacccacacgtatcaggaggactaaaagaaggaatcgaaacactactaatgacacaacgaccagcactatcaggagacgcagtacaaaaaatgctaggacactgcacattcgaaccagcagaaccaaaagcagcaaaaaacacatacacagcagaacgattcatctgactaacaaaactaaacaacctacgaatcctagaacaaggatcagaacgaccactaacagacacagaacgagcaacactaatggacgaaccataccgaaaatcaaaactaacatacgcacaagcacgaaaactactaggactagaagacacagcattcttcaaaggactacgatacggaaaagacaacgcagaagcatcaacactaatggaaatgaaagcataccacgcaatctcacgagcactagaaaaagaaggactaaaagacaaaaaatcaccactaaacctatcaccagaactacaagacgaaatcggaacagcattctcactattcaaaacagacgaagacatcacaggacgactaaaagaccgaatccaaccagaaatcctagaagcactactaaaacacatctcattcgacaaattcgtacaaatctcactaaaagcactacgacgaatcgtaccactaatggaacaaggaaaacgatacgacgaagcatgcgcagaaatctacggagaccactacggaaaaaaaaacacagaagaaaaaatctacctaccaccaatcccagcagacgaaatccgaaacccagtagtactacgagcactatcacaagcacgaaaagtaatcaacggagtagtacgacgatacggatcaccagcacgaatccacatcgaaacagcacgagaagtaggaaaatcattcaaagaccgaaaagaaatcgaaaaacgacaagaagaaaaccgaaaagaccgagaaaaagcagcagcaaaattccgagaatacttcccaaacttcgtaggagaaccaaaatcaaaagacatcctaaaactacgactatacgaacaacaacacggaaaatgcctatactcaggaaaagaaatcaacctaggacgactaaacgaaaaaggatacgtagaaatcgaccacgcactaccattctcacgaacatgagacgactcattcaacaacaaagtactagtactaggatcagaaaaccaaaacaaaggaaaccaaacaccatacgaatacttcaacggaaaagacaactcacgagaatgacaagaattcaaagcacgagtagaaacatcacgattcccacgatcaaaaaaacaacgaatcctactacaaaaattcgacgaagacggattcaaagaacgaaacctaaacgacacacgatacgtaaaccgattcctatgccaattcgtagcagaccgaatgcgactaacaggaaaaggaaaaaaacgagtattcgcatcaaacggacaaatcacaaacctactacgaggattctgaggactacgaaaagtacgagcagaaaacgaccgacaccacgcactagacgcagtagtagtagcatgctcaacagtagcaatgcaacaaaaaatcacacgattcgtacgatacaaagaaatgaacgcattcgacggaaaaacaatcgacaaagaaacaggagaagtactacaccaaaaaacacacttcccacaaccatgagaattcttcgcacaagaagtaatgatccgagtattcggaaaaccagacggaaaaccagaattcgaagaagcagacacactagaaaaactacgaacactactagcagaaaaactatcatcacgaccagaagcagtacacgaatacgtaacaccactattcgtatcacgagcaccaaaccgaaaaatgtcaggacaaggacacatggaaacagtaaaatcagcaaaacgactagacgaaggagtatcagtactacgagtaccactaacacaactaaaactaaaagacctagaaaaaatggtaaaccgagaacgagaaccaaaactatacgaagcactaaaagcacgactagaagcacacaaagacgacccagcaaaagcattcgcagaaccattctacaaatacgacaaagcaggaaaccgaacacaacaagtaaaagcagtacgagtagaacaagtacaaaaaacaggagtatgagtacgaaaccacaacggaatcgcagacaacgcaacaatggtacgagtagacgtattcgaaaaaggagacaaatactacctagtaccaatctactcatgacaagtagcaaaaggaatcctaccagaccgagcagtagtacaaggaaaagacgaagaagactgacaactaatcgacgactcattcaacttcaaattctcactacacccaaacgacctagtagaagtaatcacaaaaaaagcacgaatgttcggatacttcgcatcatgccaccgaggaacaggaaacatcaacatccgaatccacgacctagaccacaaaatcggaaaaaacggaatcctagaaggaatcggagtaaaaacagcactatcattccaaaaataccaaatcgacgaactaggaaaagaaatccgaccatgccgactaaaaaaacgaccaccagtacgataa

SEQ ID NO: 227 - protein, 1082 aa, synthetic construct
  REGION 1..1082: note = Synthetic
MAAFKPNSINYILGLAIGIASVGWAMVEIDEEENPIRLIDLGVRVFERAEVPKTGDSLAMARRLARSVRRLTRRRAHRLLRTRRLLKREGVLQAANFDENGLIKSLPNTPWQLRAAALDRKLTPLEWSAVLLHLIKHRGYLSQRKNEGETADKELGALLKGVAGNAHALQTGDFRTPAELALNKFEKESGHIRNQRSDYSHTFSRKDLQAELILLFEKQKEFGNPHVSGGLKEGIETLLMTQRPALSGDAVQKMLGHCTFEPAEPKAAKNTYTAERFIWLTKLNNLRILEQGSERPLTDTERATLMDEPYRKSKLTYAQARKLLGLEDTAFFKGLRYGKDNAEASTLMEMKAYHAISRALEKEGLKDKKSPLNLSPELQDEIGTAFSLFKTDEDITGRLKDRIQPEILEALLKHISFDKFVQISLKALRRIVPLMEQGKRYDEACAEIYGDHYGKKNTEEKIYLPPIPADEIRNPVVLRALSQARKVINGVVRRYGSPARIHIETAREVGKSFKDRKEIEKRQEENRKDREKAAAKFREYFPNFVGEPKSKDILKLRLYEQQHGKCLYSGKEINLGRLNEKGYVEIDAALPFSRTWDDSFNNKVLVLGSENQNKGNQTPYEYFNGKDNSREWQEFKARVETSRFPRSKKQRILLQKFDEDGFKERNLNDTRYVNRFLCQFVADRMRLTGKGKKRVFASNGQITNLLRGFWGLRKVRAENDRHHALDAVVVACSTVAMQQKITRFVRYKEMNAFDGKTIDKETGEVLHQKTHFPQPWEFFAQEVMIRVFGKPDGKPEFEEADTLEKLRTLLAEKLSSRPEAVHEYVTPLFVSRAPNRKMSGQGHMETVKSAKRLDEGVSVLRVPLTQLKLKDLEKMVNREREPKLYEALKARLEAHKDDPAKAFAEPFYKYDKAGNRTQQVKAVRVEQVQKTGVWVRNHNGIADNATMVRVDVFEKGDKYYLVPIYSWQVAKGILPDRAVVQGKDEEDWQLIDDSFNFKFSLHPNDLVEVITKKARMFGYFASCHRGTGNINIRIHDLDHKIGKNGILEGIGVKTALSFQKYQIDELGKEIRPCRLKKRPPVR

SEQ ID NO: 228 - DNA, 3243 bp, synthetic construct
  misc_feature 1..3243: note = Synthetic
  source 1..3243: mol_type = other DNA
gctgcttttaagcctaattctattaattatattcttggtcttgctattggtattgcttctgttggttgggctatggttgagattgatgaggaggagaatcctattcgtcttattgatcttggtgttcgtgtttttgagcgtgctgaggttcctaagactggtgattctcttgctatggctcgtcgtcttgctcgttctgttcgtcgtcttactcgtcgtcgtgctcatcgtcttcttcgtactcgtcgtcttcttaagcgtgagggtgttcttcaggctgctaattttgatgagaatggtcttattaagtctcttcctaatactccttggcagcttcgtgctgctgctcttgatcgtaagcttactcctcttgagtggtctgctgttcttcttcatcttattaagcatcgtggttatctttctcagcgtaagaatgagggtgagactgctgataaggagcttggtgctcttcttaagggtgttgctggtaatgctcatgctcttcagactggtgattttcgtactcctgctgagcttgctcttaataagtttgagaaggagtctggtcatattcgtaatcagcgttctgattattctcatactttttctcgtaaggatcttcaggctgagcttattcttctttttgagaagcagaaggagtttggtaatcctcatgtttctggtggtcttaaggagggtattgagactcttcttatgactcagcgtcctgctctttctggtgatgctgttcagaagatgcttggtcattgtacttttgagcctgctgagcctaaggctgctaagaatacttatactgctgagcgttttatttggcttactaagcttaataatcttcgtattcttgagcagggttctgagcgtcctcttactgatactgagcgtgctactcttatggatgagccttatcgtaagtctaagcttacttatgctcaggctcgtaagcttcttggtcttgaggatactgctttttttaagggtcttcgttatggtaaggataatgctgaggcttctactcttatggagatgaaggcttatcatgctatttctcgtgctcttgagaaggagggtcttaaggataagaagtctcctcttaatctttctcctgagcttcaggatgagattggtactgctttttctctttttaagactgatgaggatattactggtcgtcttaaggatcgtattcagcctgagattcttgaggctcttcttaagcatatttcttttgataagtttgttcagatttctcttaaggctcttcgtcgtattgttcctcttatggagcagggtaagcgttatgatgaggcttgtgctgagatttatggtgatcattatggtaagaagaatactgaggagaagatttatcttcctcctattcctgctgatgagattcgtaatcctgttgttcttcgtgctctttctcaggctcgtaaggttattaatggtgttgttcgtcgttatggttctcctgctcgtattcatattgagactgctcgtgaggttggtaagtcttttaaggatcgtaaggagattgagaagcgtcaggaggagaatcgtaaggatcgtgagaaggctgctgctaagtttcgtgagtattttcctaattttgttggtgagcctaagtctaaggatattcttaagcttcgtctttatgagcagcagcatggtaagtgtctttattctggtaaggagattaatcttggtcgtcttaatgagaagggttatgttgagattgatgctgctcttcctttttctcgtacttgggatgattcttttaataataaggttcttgttcttggttctgagaatcagaataagggtaatcagactccttatgagtattttaatggtaaggataattctcgtgagtggcaggagtttaaggctcgtgttgagacttctcgttttcctcgttctaagaagcagcgtattcttcttcagaagtttgatgaggatggttttaaggagcgtaatcttaatgatactcgttatgttaatcgttttctttgtcagtttgttgctgatcgtatgcgtcttactggtaagggtaagaagcgtgtttttgcttctaatggtcagattactaatcttcttcgtggtttttggggtcttcgtaaggttcgtgctgagaatgatcgtcatcatgctcttgatgctgttgttgttgcttgttctactgttgctatgcagcagaagattactcgttttgttcgttataaggagatgaatgcttttgatggtaagactattgataaggagactggtgaggttcttcatcagaagactcattttcctcagccttgggagttttttgctcaggaggttatgattcgtgtttttggtaagcctgatggtaagcctgagtttgaggaggctgatactcttgagaagcttcgtactcttcttgctgagaagctttcttctcgtcctgaggctgttcatgagtatgttactcctctttttgtttctcgtgctcctaatcgtaagatgtctggtcagggtcatatggagactgttaagtctgctaagcgtcttgatgagggtgtttctgttcttcgtgttcctcttactcagcttaagcttaaggatcttgagaagatggttaatcgtgagcgtgagcctaagctttatgaggctcttaaggctcgtcttgaggctcataaggatgatcctgctaaggcttttgctgagcctttttataagtatgataaggctggtaatcgtactcagcaggttaaggctgttcgtgttgagcaggttcagaagactggtgtttgggttcgtaatcataatggtattgctgataatgctactatggttcgtgttgatgtttttgagaagggtgataagtattatcttgttcctatttattcttggcaggttgctaagggtattcttcctgatcgtgctgttgttcagggtaaggatgaggaggattggcagcttattgatgattcttttaattttaagttttctcttcatcctaatgatcttgttgaggttattactaagaaggctcgtatgtttggttattttgcttcttgtcatcgtggtactggtaatattaatattcgtattcatgatcttgatcataagattggtaagaatggtattcttgagggtattggtgttaagactgctctttcttttcagaagtatcagattgatgagcttggtaaggagattcgtccttgtcgtcttaagaagcgtcctcctgttcgt

SEQ ID NO: 229 - DNA, 3243 bp, synthetic construct
  misc_feature 1..3243: note = Synthetic
  source 1..3243: mol_type = other DNA
gccgccttcaagcccaactccatcaactacatcctgggcctggccatcggcatcgcctccgtgggctgggccatggtggagatcgacgaggaggagaaccccatccggctgatcgacctgggcgtgcgggtgttcgagcgggccgaggtgcccaagaccggcgactccctggccatggcccggcggctggcccggtccgtgcggcggctgacccggcggcgggcccaccggctgctgcggacccggcggctgctgaagcgggagggcgtgctgcaggccgccaacttcgacgagaacggcctgatcaagtccctgcccaacaccccctggcagctgcgggccgccgccctggaccggaagctgacccccctggagtggtccgccgtgctgctgcacctgatcaagcaccggggctacctgtcccagcggaagaacgagggcgagaccgccgacaaggagctgggcgccctgctgaagggcgtggccggcaacgcccacgccctgcagaccggcgacttccggacccccgccgagctggccctgaacaagttcgagaaggagtccggccacatccggaaccagcggtccgactactcccacaccttctcccggaaggacctgcaggccgagctgatcctgctgttcgagaagcagaaggagttcggcaacccccacgtgtccggcggcctgaaggagggcatcgagaccctgctgatgacccagcggcccgccctgtccggcgacgccgtgcagaagatgctgggccactgcaccttcgagcccgccgagcccaaggccgccaagaacacctacaccgccgagcggttcatctggctgaccaagctgaacaacctgcggatcctggagcagggctccgagcggcccctgaccgacaccgagcgggccaccctgatggacgagccctaccggaagtccaagctgacctacgcccaggcccggaagctgctgggcctggaggacaccgccttcttcaagggcctgcggtacggcaaggacaacgccgaggcctccaccctgatggagatgaaggcctaccacgccatctcccgggccctggagaaggagggcctgaaggacaagaagtcccccctgaacctgtcccccgagctgcaggacgagatcggcaccgccttctccctgttcaagaccgacgaggacatcaccggccggctgaaggaccggatccagcccgagatcctggaggccctgctgaagcacatctccttcgacaagttcgtgcagatctccctgaaggccctgcggcggatcgtgcccctgatggagcagggcaagcggtacgacgaggcctgcgccgagatctacggcgaccactacggcaagaagaacaccgaggagaagatctacctgccccccatccccgccgacgagatccggaaccccgtggtgctgcgggccctgtcccaggcccggaaggtgatcaacggcgtggtgcggcggtacggctcccccgcccggatccacatcgagaccgcccgggaggtgggcaagtccttcaaggaccggaaggagatcgagaagcggcaggaggagaaccggaaggaccgggagaaggccgccgccaagttccgggagtacttccccaacttcgtgggcgagcccaagtccaaggacatcctgaagctgcggctgtacgagcagcagcacggcaagtgcctgtactccggcaaggagatcaacctgggccggctgaacgagaagggctacgtggagatcgacgccgccctgcccttctcccggacctgggacgactccttcaacaacaaggtgctggtgctgggctccgagaaccagaacaagggcaaccagaccccctacgagtacttcaacggcaaggacaactcccgggagtggcaggagttcaaggcccgggtggagacctcccggttcccccggtccaagaagcagcggatcctgctgcagaagttcgacgaggacggcttcaaggagcggaacctgaacgacacccggtacgtgaaccggttcctgtgccagttcgtggccgaccggatgcggctgaccggcaagggcaagaagcgggtgttcgcctccaacggccagatcaccaacctgctgcggggcttctggggcctgcggaaggtgcgggccgagaacgaccggcaccacgccctggacgccgtggtggtggcctgctccaccgtggccatgcagcagaagatcacccggttcgtgcggtacaaggagatgaacgccttcgacggcaagaccatcgacaaggagaccggcgaggtgctgcaccagaagacccacttcccccagccctgggagttcttcgcccaggaggtgatgatccgggtgttcggcaagcccgacggcaagcccgagttcgaggaggccgacaccctggagaagctgcggaccctgctggccgagaagctgtcctcccggcccgaggccgtgcacgagtacgtgacccccctgttcgtgtcccgggcccccaaccggaagatgtccggccagggccacatggagaccgtgaagtccgccaagcggctggacgagggcgtgtccgtgctgcgggtgcccctgacccagctgaagctgaaggacctggagaagatggtgaaccgggagcgggagcccaagctgtacgaggccctgaaggcccggctggaggcccacaaggacgaccccgccaaggccttcgccgagcccttctacaagtacgacaaggccggcaaccggacccagcaggtgaaggccgtgcgggtggagcaggtgcagaagaccggcgtgtgggtgcggaaccacaacggcatcgccgacaacgccaccatggtgcgggtggacgtgttcgagaagggcgacaagtactacctggtgcccatctactcctggcaggtggccaagggcatcctgcccgaccgggccgtggtgcagggcaaggacgaggaggactggcagctgatcgacgactccttcaacttcaagttctccctgcaccccaacgacctggtggaggtgatcaccaagaaggcccggatgttcggctacttcgcctcctgccaccggggcaccggcaacatcaacatccggatccacgacctggaccacaagatcggcaagaacggcatcctggagggcatcggcgtgaagaccgccctgtccttccagaagtaccagatcgacgagctgggcaaggagatccggccctgccggctgaagaagcggccccccgtgcgg

SEQ ID NO: 230 - DNA, 3243 bp, synthetic construct
  misc_feature 1..3243: note = Synthetic
  source 1..3243: mol_type = other DNA
gcagcattcaaaccaaactcaatcaactacatcctaggactagcaatcggaatcgcatcagtaggatgagcaatggtagaaatcgacgaagaagaaaacccaatccgactaatcgacctaggagtacgagtattcgaacgagcagaagtaccaaaaacaggagactcactagcaatggcacgacgactagcacgatcagtacgacgactaacacgacgacgagcacaccgactactacgaacacgacgactactaaaacgagaaggagtactacaagcagcaaacttcgacgaaaacggactaatcaaatcactaccaaacacaccatgacaactacgagcagcagcactagaccgaaaactaacaccactagaatgatcagcagtactactacacctaatcaaacaccgaggatacctatcacaacgaaaaaacgaaggagaaacagcagacaaagaactaggagcactactaaaaggagtagcaggaaacgcacacgcactacaaacaggagacttccgaacaccagcagaactagcactaaacaaattcgaaaaagaatcaggacacatccgaaaccaacgatcagactactcacacacattctcacgaaaagacctacaagcagaactaatcctactattcgaaaaacaaaaagaattcggaaacccacacgtatcaggaggactaaaagaaggaatcgaaacactactaatgacacaacgaccagcactatcaggagacgcagtacaaaaaatgctaggacactgcacattcgaaccagcagaaccaaaagcagcaaaaaacacatacacagcagaacgattcatctgactaacaaaactaaacaacctacgaatcctagaacaaggatcagaacgaccactaacagacacagaacgagcaacactaatggacgaaccataccgaaaatcaaaactaacatacgcacaagcacgaaaactactaggactagaagacacagcattcttcaaaggactacgatacggaaaagacaacgcagaagcatcaacactaatggaaatgaaagcataccacgcaatctcacgagcactagaaaaagaaggactaaaagacaaaaaatcaccactaaacctatcaccagaactacaagacgaaatcggaacagcattctcactattcaaaacagacgaagacatcacaggacgactaaaagaccgaatccaaccagaaatcctagaagcactactaaaacacatctcattcgacaaattcgtacaaatctcactaaaagcactacgacgaatcgtaccactaatggaacaaggaaaacgatacgacgaagcatgcgcagaaatctacggagaccactacggaaaaaaaaacacagaagaaaaaatctacctaccaccaatcccagcagacgaaatccgaaacccagtagtactacgagcactatcacaagcacgaaaagtaatcaacggagtagtacgacgatacggatcaccagcacgaatccacatcgaaacagcacgagaagtaggaaaatcattcaaagaccgaaaagaaatcgaaaaacgacaagaagaaaaccgaaaagaccgagaaaaagcagcagcaaaattccgagaatacttcccaaacttcgtaggagaaccaaaatcaaaagacatcctaaaactacgactatacgaacaacaacacggaaaatgcctatactcaggaaaagaaatcaacctaggacgactaaacgaaaaaggatacgtagaaatcgacgcagcactaccattctcacgaacatgagacgactcattcaacaacaaagtactagtactaggatcagaaaaccaaaacaaaggaaaccaaacaccatacgaatacttcaacggaaaagacaactcacgagaatgacaagaattcaaagcacgagtagaaacatcacgattcccacgatcaaaaaaacaacgaatcctactacaaaaattcgacgaagacggattcaaagaacgaaacctaaacgacacacgatacgtaaaccgattcctatgccaattcgtagcagaccgaatgcgactaacaggaaaaggaaaaaaacgagtattcgcatcaaacggacaaatcacaaacctactacgaggattctgaggactacgaaaagtacgagcagaaaacgaccgacaccacgcactagacgcagtagtagtagcatgctcaacagtagcaatgcaacaaaaaatcacacgattcgtacgatacaaagaaatgaacgcattcgacggaaaaacaatcgacaaagaaacaggagaagtactacaccaaaaaacacacttcccacaaccatgagaattcttcgcacaagaagtaatgatccgagtattcggaaaaccagacggaaaaccagaattcgaagaagcagacacactagaaaaactacgaacactactagcagaaaaactatcatcacgaccagaagcagtacacgaatacgtaacaccactattcgtatcacgagcaccaaaccgaaaaatgtcaggacaaggacacatggaaacagtaaaatcagcaaaacgactagacgaaggagtatcagtactacgagtaccactaacacaactaaaactaaaagacctagaaaaaatggtaaaccgagaacgagaaccaaaactatacgaagcactaaaagcacgactagaagcacacaaagacgacccagcaaaagcattcgcagaaccattctacaaatacgacaaagcaggaaaccgaacacaacaagtaaaagcagtacgagtagaacaagtacaaaaaacaggagtatgagtacgaaaccacaacggaatcgcagacaacgcaacaatggtacgagtagacgtattcgaaaaaggagacaaatactacctagtaccaatctactcatgacaagtagcaaaaggaatcctaccagaccgagcagtagtacaaggaaaagacgaagaagactgacaactaatcgacgactcattcaacttcaaattctcactacacccaaacgacctagtagaagtaatcacaaaaaaagcacgaatgttcggatacttcgcatcatgccaccgaggaacaggaaacatcaacatccgaatccacgacctagaccacaaaatcggaaaaaacggaatcctagaaggaatcggagtaaaaacagcactatcattccaaaaataccaaatcgacgaactaggaaaagaaatccgaccatgccgactaaaaaaacgaccaccagtacga

SEQ ID NO: 231 - RNA, 3249 nt, synthetic construct
  modified_base 2: mod_base = OTHER; note = thymine
  modified_base 6: mod_base = OTHER; note = thymine
  modified_base 9..12: mod_base = OTHER; note = thymine
  modified_base 18: mod_base = OTHER; note = thymine
  modified_base 21..22: mod_base = OTHER; note = thymine
  modified_base 24: mod_base = OTHER; note = thymine
  modified_base 26..27: mod_base = OTHER; note = thymine
  modified_base 30..31: mod_base = OTHER; note = thymine
  modified_base 33: mod_base = OTHER; note = thymine
  modified_base 35..36: mod_base = OTHER; note = thymine
  modified_base 38..39: mod_base = OTHER; note = thymine
  modified_base 42: mod_base = OTHER; note = thymine
  modified_base 44..45: mod_base = OTHER; note = thymine
  modified_base 48: mod_base = OTHER; note = thymine
  modified_base 50..51: mod_base = OTHER; note = thymine
  modified_base 54: mod_base = OTHER; note = thymine
  modified_base 56..57: mod_base = OTHER; note = thymine
  modified_base 60..61: mod_base = OTHER; note = thymine
  modified_base 63: mod_base = OTHER; note = thymine
  modified_base 65..66: mod_base = OTHER; note = thymine
  modified_base 69..70: mod_base = OTHER; note = thymine
  modified_base 75: mod_base = OTHER; note = thymine
  modified_base 77: mod_base = OTHER; note = thymine
  modified_base 80..81: mod_base = OTHER; note = thymine
  modified_base 86..87: mod_base = OTHER; note = thymine
  modified_base 90: mod_base = OTHER; note = thymine
  modified_base 102: mod_base = OTHER; note = thymine
  modified_base 105: mod_base = OTHER; note = thymine
  modified_base 107..108: mod_base = OTHER; note = thymine
  modified_base 111: mod_base = OTHER; note = thymine
  modified_base 113..114: mod_base = OTHER; note = thymine
  modified_base 116..117: mod_base = OTHER; note = thymine
  modified_base 120: mod_base = OTHER; note = thymine
  modified_base 122..123: mod_base = OTHER; note = thymine
  modified_base 126: mod_base = OTHER; note = thymine
  modified_base 128..129: mod_base = OTHER; note = thymine
  modified_base 132: mod_base = OTHER; note = thymine
  modified_base 134..138: mod_base = OTHER; note = thymine
  modified_base 144: mod_base = OTHER; note = thymine
  modified_base 147: mod_base = OTHER; note = thymine
  modified_base 152..153: mod_base = OTHER; note = thymine
  modified_base 156: mod_base = OTHER; note = thymine
  modified_base 162: mod_base = OTHER; note = thymine
  modified_base 165: mod_base = OTHER; note = thymine
  modified_base 168..169: mod_base = OTHER; note = thymine
  modified_base 171: mod_base = OTHER; note = thymine
  modified_base 173..174: mod_base = OTHER; note = thymine
  modified_base 177: mod_base = OTHER; note = thymine
  modified_base 179: mod_base = OTHER; note = thymine
  modified_base 183: mod_base = OTHER; note = thymine
  modified_base 186: mod_base = OTHER; note = thymine
  modified_base 189: mod_base = OTHER; note = thymine
  modified_base 191..192: mod_base = OTHER; note = thymine
  modified_base 195: mod_base = OTHER; note = thymine
  modified_base 198..199: mod_base = OTHER; note = thymine
  modified_base 201: mod_base = OTHER; note = thymine
  modified_base 203..204: mod_base = OTHER; note = thymine
  modified_base 207: mod_base = OTHER; note = thymine
  modified_base 210: mod_base = OTHER; note = thymine
  modified_base 212..213: mod_base = OTHER; note = thymine
  modified_base 216: mod_base = OTHER; note = thymine
  modified_base 219: mod_base = OTHER; note = thymine
  modified_base 222: mod_base = OTHER; note = thymine
  modified_base 225: mod_base = OTHER; note = thymine
  modified_base 228: mod_base = OTHER; note = thymine
  modified_base 231: mod_base = OTHER; note = thymine
  modified_base 234: mod_base = OTHER; note = thymine
  modified_base 236..237: mod_base = OTHER; note = thymine
  modified_base 239..240: mod_base = OTHER; note = thymine
  modified_base 243: mod_base = OTHER; note = thymine
  modified_base 246: mod_base = OTHER; note = thymine
  modified_base 249: mod_base = OTHER; note = thymine
  modified_base 252: mod_base = OTHER; note = thymine
  modified_base 254..255: mod_base = OTHER; note = thymine
  modified_base 257..258: mod_base = OTHER; note = thymine
  modified_base 264: mod_base = OTHER; note = thymine
  modified_base 270: mod_base = OTHER; note = thymine
  modified_base 272..273: mod_base = OTHER; note = thymine
  modified_base 275..276: mod_base = OTHER; note = thymine
  modified_base 282: mod_base = OTHER; note = thymine
  modified_base 285: mod_base = OTHER; note = thymine
  modified_base 288..291: mod_base = OTHER; note = thymine
  modified_base 294: mod_base = OTHER; note = thymine
  modified_base 300: mod_base = OTHER; note = thymine
  modified_base 303: mod_base = OTHER; note = thymine
  modified_base 305..306: mod_base = OTHER; note = thymine
  modified_base 308..309: mod_base = OTHER; note = thymine
  modified_base 313: mod_base = OTHER; note = thymine
  modified_base 315: mod_base = OTHER; note = thymine
  modified_base 317..318: mod_base = OTHER; note = thymine
  modified_base 321: mod_base = OTHER; note = thymine
  modified_base 324: mod_base = OTHER; note = thymine
  modified_base 327: mod_base = OTHER; note = thymine
  modified_base 330..331: mod_base = OTHER; note = thymine
  modified_base 338..339: mod_base = OTHER; note = thymine
  modified_base 342: mod_base = OTHER; note = thymine
  modified_base 345: mod_base = OTHER; note = thymine
  modified_base 348: mod_base = OTHER; note = thymine
  modified_base 351: mod_base = OTHER; note = thymine
  modified_base 353..354: mod_base = OTHER; note = thymine
  modified_base 357: mod_base = OTHER; note = thymine
  modified_base 360: mod_base = OTHER; note = thymine
  modified_base 365..366: mod_base = OTHER; note = thymine
  modified_base 369: mod_base = OTHER; note = thymine
  modified_base 372: mod_base = OTHER; note = thymine
  modified_base 374..375: mod_base = OTHER; note = thymine
  modified_base 379: mod_base = OTHER; note = thymine
  modified_base 382: mod_base = OTHER; note = thymine
  modified_base 384: mod_base = OTHER; note = thymine
  modified_base 387: mod_base = OTHER; note = thymine
  modified_base 389..390: mod_base = OTHER; note = thymine
  modified_base 392..393: mod_base = OTHER; note = thymine
  modified_base 395..396: mod_base = OTHER; note = thymine
  modified_base 399: mod_base = OTHER; note = thymine
  modified_base 401..402: mod_base = OTHER; note = thymine
  modified_base 404..405: mod_base = OTHER; note = thymine
  modified_base 411: mod_base = OTHER; note = thymine
  modified_base 414: mod_base = OTHER; note = thymine
  modified_base 417..418: mod_base = OTHER; note = thymine
  modified_base 420: mod_base = OTHER; note = thymine
  modified_base 422..424: mod_base = OTHER; note = thymine
  modified_base 426: mod_base = OTHER; note = thymine
  modified_base 432: mod_base = OTHER; note = thymine
  modified_base 438: mod_base = OTHER; note = thymine
  modified_base 444: mod_base = OTHER; note = thymine
  modified_base 450: mod_base = OTHER; note = thymine
  modified_base 453: mod_base = OTHER; note = thymine
  modified_base 456: mod_base = OTHER; note = thymine
  modified_base 464..465: mod_base = OTHER; note = thymine
  modified_base 468: mod_base = OTHER; note = thymine
  modified_base 471: mod_base = OTHER; note = thymine
  modified_base 473..474: mod_base = OTHER; note = thymine
  modified_base 476..477: mod_base = OTHER; note = thymine
  modified_base 483: mod_base = OTHER; note = thymine
  modified_base 485..486: mod_base = OTHER; note = thymine
  modified_base 489: mod_base = OTHER; note = thymine
  modified_base 492: mod_base = OTHER; note = thymine
  modified_base 495: mod_base = OTHER; note = thymine
  modified_base 498: mod_base = OTHER; note = thymine
  modified_base 501: mod_base = OTHER; note = thymine
  modified_base 504: mod_base = OTHER; note = thymine
  modified_base 506..507: mod_base = OTHER; note = thymine
  modified_base 513: mod_base = OTHER; note = thymine
  modified_base 516: mod_base = OTHER; note = thymine
  modified_base 519..522: mod_base = OTHER; note = thymine
  modified_base 525: mod_base = OTHER; note = thymine
  modified_base 528: mod_base = OTHER; note = thymine
  modified_base 531: mod_base = OTHER; note = thymine
  modified_base 534: mod_base = OTHER; note = thymine
  modified_base 539..540: mod_base = OTHER; note = thymine
  modified_base 543: mod_base = OTHER; note = thymine
  modified_base 545..546: mod_base = OTHER; note = thymine
  modified_base 549: mod_base = OTHER; note = thymine
  modified_base 553..555: mod_base = OTHER; note = thymine
  modified_base 565: mod_base = OTHER; note = thymine
  modified_base 567: mod_base = OTHER; note = thymine
  modified_base 570: mod_base = OTHER; note = thymine
  modified_base 573: mod_base = OTHER; note = thymine
  modified_base 575..576: mod_base = OTHER; note = thymine
  modified_base 579: mod_base = OTHER; note = thymine
  modified_base 582: mod_base = OTHER; note = thymine
  modified_base 588..589: mod_base = OTHER; note = thymine
  modified_base 591: mod_base = OTHER; note = thymine
  modified_base 594..595: mod_base = OTHER; note = thymine
  modified_base 597..598: mod_base = OTHER; note = thymine
  modified_base 600: mod_base = OTHER; note = thymine
  modified_base 603: mod_base = OTHER; note = thymine
  modified_base 606..610: mod_base = OTHER; note = thymine
  modified_base 612: mod_base = OTHER; note = thymine
  modified_base 615: mod_base = OTHER; note = thymine
  modified_base 621: mod_base = OTHER; note = thymine
  modified_base 623..624: mod_base = OTHER; note = thymine
  modified_base 630: mod_base = OTHER; note = thymine
  modified_base 635..636: mod_base = OTHER; note = thymine
  modified_base 638..639: mod_base = OTHER; note = thymine
  modified_base 641..642: mod_base = OTHER; note = thymine
  modified_base 644..648: mod_base = OTHER; note = thymine
  modified_base 664..666: mod_base = OTHER; note = thymine
  modified_base 669: mod_base = OTHER; note = thymine
  modified_base 672: mod_base = OTHER; note = thymine
  modified_base 675: mod_base = OTHER; note = thymine
  modified_base 678: mod_base = OTHER; note = thymine
  modified_base 680..682: mod_base = OTHER; note = thymine
  modified_base 684: mod_base = OTHER; note = thymine
  modified_base 687: mod_base = OTHER; note = thymine
  modified_base 690: mod_base = OTHER; note = thymine
  modified_base 692..693: mod_base = OTHER; note = thymine
  modified_base 702: mod_base = OTHER; note = thymine
  modified_base 704..705: mod_base = OTHER; note = thymine
  modified_base 711: mod_base = OTHER; note = thymine
  modified_base 713..714: mod_base = OTHER; note = thymine
  modified_base 716..717: mod_base = OTHER; note = thymine
  modified_base 719: mod_base = OTHER; note = thymine
  modified_base 723: mod_base = OTHER; note = thymine
  modified_base 729: mod_base = OTHER; note = thymine
  modified_base 732: mod_base = OTHER; note = thymine
  modified_base 735: mod_base = OTHER; note = thymine
  modified_base 737..739: mod_base = OTHER; note = thymine
  modified_base 741: mod_base = OTHER; note = thymine
  modified_base 744: mod_base = OTHER; note = thymine
  modified_base 747: mod_base = OTHER; note = thymine
  modified_base 750: mod_base = OTHER; note = thymine
  modified_base 752..753: mod_base = OTHER; note = thymine
  modified_base 761: mod_base = OTHER; note = thymine
  modified_base 764..765: mod_base = OTHER; note = thymine
  modified_base 768: mod_base = OTHER; note = thymine
  modified_base 771..772: mod_base = OTHER; note = thymine
  modified_base 774: mod_base = OTHER; note = thymine
  modified_base 777..780: mod_base = OTHER; note = thymine
  modified_base 786: mod_base = OTHER; note = thymine
  modified_base 789: mod_base = OTHER; note = thymine
  modified_base 795: mod_base = OTHER; note = thymine
  modified_base 801: mod_base = OTHER; note = thymine
  modified_base 804: mod_base = OTHER; note = thymine
  modified_base 810: mod_base = OTHER; note = thymine
  modified_base 813..814: mod_base = OTHER; note = thymine
  modified_base 816: mod_base = OTHER; note = thymine
  modified_base 819: mod_base = OTHER; note = thymine
  modified_base 822: mod_base = OTHER; note = thymine
  modified_base 828..831: mod_base = OTHER; note = thymine
  modified_base 833..835: mod_base = OTHER; note = thymine
  modified_base 839..840: mod_base = OTHER; note = thymine
  modified_base 843: mod_base = OTHER; note = thymine
  modified_base 848..849: mod_base = OTHER; note = thymine
  modified_base 852: mod_base = OTHER; note = thymine
  modified_base 855: mod_base = OTHER; note = thymine
  modified_base 857..858: mod_base = OTHER; note = thymine
  modified_base 861: mod_base = OTHER; note = thymine
  modified_base 863..864: mod_base = OTHER; note = thymine
  modified_base 866..867: mod_base = OTHER; note = thymine
  modified_base 876..877: mod_base = OTHER; note = thymine
  modified_base 879: mod_base = OTHER; note = thymine
  modified_base 885: mod_base = OTHER; note = thymine
  modified_base 888: mod_base = OTHER; note = thymine
  modified_base 890..891: mod_base = OTHER; note = thymine
  modified_base 894: mod_base = OTHER; note = thymine
  modified_base 897: mod_base = OTHER; note = thymine
  modified_base 900: mod_base = OTHER; note = thymine
  modified_base 906: mod_base = OTHER; note = thymine
  modified_base 909: mod_base = OTHER; note = thymine
  modified_base 912: mod_base = OTHER; note = thymine
  modified_base 914..915: mod_base = OTHER; note = thymine
  modified_base 917: mod_base = OTHER; note = thymine
  modified_base 921: mod_base = OTHER; note = thymine
  modified_base 927..928: mod_base = OTHER; note = thymine
  modified_base 930: mod_base = OTHER; note = thymine
  modified_base 933: mod_base = OTHER; note = thymine
  modified_base 937: mod_base = OTHER; note = thymine
  modified_base 939: mod_base = OTHER; note = thymine
  modified_base 944..945: mod_base = OTHER; note = thymine
  modified_base 948..949: mod_base = OTHER; note = thymine
  modified_base 951: mod_base = OTHER; note = thymine
  modified_base 954: mod_base = OTHER; note = thymine
  modified_base 960: mod_base = OTHER; note = thymine
  modified_base 963: mod_base = OTHER; note = thymine
  modified_base 968..969: mod_base = OTHER; note = thymine
  modified_base 971..972: mod_base = OTHER; note = thymine
  modified_base 975: mod_base = OTHER; note = thymine
  modified_base 977..978: mod_base = OTHER; note = thymine
  modified_base 984: mod_base = OTHER; note = thymine
  modified_base 987: mod_base = OTHER; note = thymine
  modified_base 990..996: mod_base = OTHER; note = thymine
  modified_base 1002: mod_base = OTHER; note = thymine
  modified_base 1004..1005: mod_base = OTHER; note = thymine
  modified_base 1008..1009: mod_base = OTHER; note = thymine
  modified_base 1011: mod_base = OTHER; note = thymine
  modified_base 1014: mod_base = OTHER; note = thymine
  modified_base 1020: mod_base = OTHER; note = thymine
  modified_base 1023: mod_base = OTHER; note = thymine
  modified_base 1026: mod_base = OTHER; note = thymine
  modified_base 1032..1033: mod_base = OTHER; note = thymine
  modified_base 1035: mod_base = OTHER; note = thymine
  modified_base 1038: mod_base = OTHER; note = thymine
  modified_base 1040..1041: mod_base = OTHER; note = thymine
  modified_base 1043: mod_base = OTHER; note = thymine
  modified_base 1049: mod_base = OTHER; note = thymine
  modified_base 1056..1057: mod_base = OTHER; note = thymine
  modified_base 1059: mod_base = OTHER; note = thymine
  modified_base 1062: mod_base = OTHER; note = thymine
  modified_base 1065: mod_base = OTHER; note = thymine
  modified_base 1067..1069: mod_base = OTHER; note = thymine
  modified_base 1071: mod_base = OTHER; note = thymine
  modified_base 1074: mod_base = OTHER; note = thymine
  modified_base 1077: mod_base = OTHER; note = thymine
  modified_base 1079..1080: mod_base = OTHER; note = thymine
  modified_base 1092: mod_base = OTHER; note = thymine
  modified_base 1094..1095: mod_base = OTHER; note = thymine
  modified_base 1101: mod_base = OTHER; note = thymine
  modified_base 1108: mod_base = OTHER; note = thymine
  modified_base 1110: mod_base = OTHER; note = thymine
  modified_base 1113: mod_base = OTHER; note = thymine
  modified_base 1115..1116: mod_base = OTHER; note = thymine
  modified_base 1119: mod_base = OTHER; note = thymine
  modified_base 1121..1123: mod_base = OTHER; note = thymine
  modified_base 1125: mod_base = OTHER; note = thymine
  modified_base 1128: mod_base = OTHER; note = thymine
  modified_base 1133..1134: mod_base = OTHER; note = thymine
  modified_base 1140: mod_base = OTHER; note = thymine
  modified_base 1145..1146: mod_base = OTHER; note = thymine
  modified_base 1149: mod_base = OTHER; note = thymine
  modified_base 1152: mod_base = OTHER; note = thymine
  modified_base 1155..1159: mod_base = OTHER; note = thymine
  modified_base 1161: mod_base = OTHER; note = thymine
  modified_base 1163..1167: mod_base = OTHER; note = thymine
  modified_base 1173: mod_base = OTHER; note = thymine
  modified_base 1176: mod_base = OTHER; note = thymine
  modified_base 1182: mod_base = OTHER; note = thymine
  modified_base 1184..1185: mod_base = OTHER; note = thymine
  modified_base 1188: mod_base = OTHER; note = thymine
  modified_base 1191: mod_base = OTHER; note = thymine
  modified_base 1194: mod_base = OTHER; note = thymine
  modified_base 1196..1197: mod_base = OTHER; note = thymine
  modified_base 1203: mod_base = OTHER; note = thymine
  modified_base 1206: mod_base = OTHER; note = thymine
  modified_base 1208..1209: mod_base = OTHER; note = thymine
  modified_base 1215: mod_base = OTHER; note = thymine
  modified_base 1220..1221: mod_base = OTHER; note = thymine
  modified_base 1223..1224: mod_base = OTHER; note = thymine
  modified_base 1230: mod_base = OTHER; note = thymine
  modified_base 1232..1233: mod_base = OTHER; note = thymine
  modified_base 1235..1236: mod_base = OTHER; note = thymine
  modified_base 1242: mod_base = OTHER; note = thymine
  modified_base 1244..1246: mod_base = OTHER; note = thymine
  modified_base 1248..1251: mod_base = OTHER; note = thymine
  modified_base 1254: mod_base = OTHER; note = thymine
  modified_base 1258..1260: mod_base = OTHER; note = thymine
  modified_base 1262..1263: mod_base = OTHER; note = thymine
  modified_base 1268..1270: mod_base = OTHER; note = thymine
  modified_base 1272: mod_base = OTHER; note = thymine
  modified_base 1274..1275: mod_base = OTHER; note = thymine
  modified_base 1281: mod_base = OTHER; note = thymine
  modified_base 1283..1284: mod_base = OTHER; note = thymine
  modified_base 1287: mod_base = OTHER; note = thymine
  modified_base 1290: mod_base = OTHER; note = thymine
  modified_base 1292..1293: mod_base = OTHER; note = thymine
  modified_base 1295..1296: mod_base = OTHER; note = thymine
  modified_base 1299: mod_base = OTHER; note = thymine
  modified_base 1301..1302: mod_base = OTHER; note = thymine
  modified_base 1304: mod_base = OTHER; note = thymine
  modified_base 1314: mod_base = OTHER; note = thymine
  modified_base 1320..1321: mod_base = OTHER; note = thymine
  modified_base 1323: mod_base = OTHER; note = thymine
  modified_base 1326: mod_base = OTHER; note = thymine
  modified_base 1332..1333: mod_base = OTHER; note = thymine
  modified_base 1335: mod_base = OTHER; note = thymine
  modified_base 1338: mod_base = OTHER; note = thymine
  modified_base 1343..1345: mod_base = OTHER; note = thymine
  modified_base 1347: mod_base = OTHER; note = thymine
  modified_base 1350: mod_base = OTHER; note = thymine
  modified_base 1353: mod_base = OTHER; note = thymine
  modified_base 1356..1357: mod_base = OTHER; note = thymine
  modified_base 1359: mod_base = OTHER; note = thymine
  modified_base 1362: mod_base = OTHER; note = thymine
  modified_base 1371: mod_base = OTHER; note = thymine
  modified_base 1374: mod_base = OTHER; note = thymine
  modified_base 1385..1387: mod_base = OTHER; note = thymine
  modified_base 1389: mod_base = OTHER; note = thymine
  modified_base 1391..1392: mod_base = OTHER; note = thymine
  modified_base 1395: mod_base = OTHER; note = thymine
  modified_base 1398: mod_base = OTHER; note = thymine
  modified_base 1400..1401: mod_base = OTHER; note = thymine
  modified_base 1404: mod_base = OTHER; note = thymine
  modified_base 1407: mod_base = OTHER; note = thymine
  modified_base 1410: mod_base = OTHER; note = thymine
  modified_base 1415..1416: mod_base = OTHER; note = thymine
  modified_base 1419: mod_base = OTHER; note = thymine
  modified_base 1422: mod_base = OTHER; note = thymine
  modified_base 1425: mod_base = OTHER; note = thymine
  modified_base 1427..1428: mod_base = OTHER; note = thymine
  modified_base 1430..1431: mod_base = OTHER; note = thymine
  modified_base 1433..1434: mod_base = OTHER; note = thymine
  modified_base 1437: mod_base = OTHER; note = thymine
  modified_base 1440: mod_base = OTHER; note = thymine
  modified_base 1442..1444: mod_base = OTHER; note = thymine
  modified_base 1446: mod_base = OTHER; note = thymine
  modified_base 1452: mod_base = OTHER; note = thymine
  modified_base 1455: mod_base = OTHER; note = thymine
  modified_base 1460..1461: mod_base = OTHER; note = thymine
  modified_base 1463..1464: mod_base = OTHER; note = thymine
  modified_base 1467: mod_base = OTHER; note = thymine
  modified_base 1470: mod_base = OTHER; note = thymine
  modified_base 1472..1473: mod_base = OTHER; note = thymine
  modified_base 1475..1476: mod_base = OTHER; note = thymine
  modified_base 1479: mod_base = OTHER; note = thymine
  modified_base 1482..1483: mod_base = OTHER; note = thymine
  modified_base 1485: mod_base = OTHER; note = thymine
  modified_base 1488..1489: mod_base = OTHER; note = thymine
  modified_base 1491: mod_base = OTHER; note = thymine
  modified_base 1494: mod_base = OTHER; note = thymine
  modified_base 1497: mod_base = OTHER; note = thymine
  modified_base 1500: mod_base = OTHER; note = thymine
  modified_base 1502..1503: mod_base = OTHER; note = thymine
  modified_base 1506: mod_base = OTHER; note = thymine
  modified_base 1508..1509: mod_base = OTHER; note = thymine
  modified_base 1515: mod_base = OTHER; note = thymine
  modified_base 1518: mod_base = OTHER; note = thymine
  modified_base 1521: mod_base = OTHER; note = thymine
  modified_base 1526..1527: mod_base = OTHER; note = thymine
  modified_base 1530: mod_base = OTHER; note = thymine
  modified_base 1534: mod_base = OTHER; note = thymine
  modified_base 1536..1539: mod_base = OTHER; note = thymine
  modified_base 1545: mod_base = OTHER; note = thymine
  modified_base 1548: mod_base = OTHER; note = thymine
  modified_base 1556..1557: mod_base = OTHER; note = thymine
  modified_base 1566: mod_base = OTHER; note = thymine
  modified_base 1578: mod_base = OTHER; note = thymine
  modified_base 1581: mod_base = OTHER; note = thymine
  modified_base 1587: mod_base = OTHER; note = thymine
  modified_base 1590: mod_base = OTHER; note = thymine
  modified_base 1599: mod_base = OTHER; note = thymine
  modified_base 1602: mod_base = OTHER; note = thymine
  modified_base 1605: mod_base = OTHER; note = thymine
  modified_base 1609..1611: mod_base = OTHER; note = thymine
  modified_base 1614: mod_base = OTHER; note = thymine
  modified_base 1618: mod_base = OTHER; note = thymine
  modified_base 1620..1623: mod_base = OTHER; note = thymine
  modified_base 1626: mod_base = OTHER; note = thymine
  modified_base 1629..1632: mod_base = OTHER; note = thymine
  modified_base 1634..1635: mod_base = OTHER; note = thymine
  modified_base 1638: mod_base = OTHER; note = thymine
  modified_base 1644: mod_base = OTHER; note = thymine
  modified_base 1648: mod_base = OTHER; note = thymine
  modified_base 1650: mod_base = OTHER; note = thymine
  modified_base 1656: mod_base = OTHER; note = thymine
  modified_base 1658..1659: mod_base = OTHER; note = thymine
  modified_base 1661..1662: mod_base = OTHER; note = thymine
  modified_base 1667..1668: mod_base = OTHER; note = thymine
  modified_base 1671: mod_base = OTHER; note = thymine
  modified_base 1673..1675: mod_base = OTHER; note = thymine
  modified_base 1677: mod_base = OTHER; note = thymine
  modified_base 1689: mod_base = OTHER; note = thymine
  modified_base 1692: mod_base = OTHER; note = thymine
  modified_base 1696: mod_base = OTHER; note = thymine
  modified_base 1698: mod_base = OTHER; note = thymine
  modified_base 1700..1702: mod_base = OTHER; note = thymine
  modified_base 1704..1705: mod_base = OTHER; note = thymine
  modified_base 1707: mod_base = OTHER; note = thymine
  modified_base 1710: mod_base = OTHER; note = thymine
  modified_base 1718..1719: mod_base = OTHER; note = thymine
  modified_base 1722: mod_base = OTHER; note = thymine
  modified_base 1724..1725: mod_base = OTHER; note = thymine
  modified_base 1728: mod_base = OTHER; note = thymine
  modified_base 1731: mod_base = OTHER; note = thymine
  modified_base 1733..1734: mod_base = OTHER; note = thymine
  modified_base 1737: mod_base = OTHER; note = thymine
  modified_base 1746..1747: mod_base = OTHER; note = thymine
  modified_base 1749: mod_base = OTHER; note = thymine
  modified_base 1751..1752: mod_base = OTHER; note = thymine
  modified_base 1757..1758: mod_base = OTHER; note = thymine
  modified_base 1761: mod_base = OTHER; note = thymine
  modified_base 1764: mod_base = OTHER; note = thymine
  modified_base 1767: mod_base = OTHER; note = thymine
  modified_base 1769..1770: mod_base = OTHER; note = thymine
  modified_base 1773..1777: mod_base = OTHER; note = thymine
  modified_base 1779: mod_base = OTHER; note = thymine
  modified_base 1782: mod_base = OTHER; note = thymine
  modified_base 1785..1786: mod_base = OTHER; note = thymine
  modified_base 1791: mod_base = OTHER; note = thymine
  modified_base 1794..1795: mod_base = OTHER; note = thymine
  modified_base 1797..1800: mod_base = OTHER; note = thymine
  modified_base 1803: mod_base = OTHER; note = thymine
  modified_base 1806: mod_base = OTHER; note = thymine
  modified_base 1811..1812: mod_base = OTHER; note = thymine
  modified_base 1814..1815: mod_base = OTHER; note = thymine
  modified_base 1817..1818: mod_base = OTHER; note = thymine
  modified_base 1820..1821: mod_base = OTHER; note = thymine
  modified_base 1824..1825: mod_base = OTHER; note = thymine
  modified_base 1827: mod_base = OTHER; note = thymine
  modified_base 1833: mod_base = OTHER; note = thymine
  modified_base 1839: mod_base = OTHER; note = thymine
  modified_base 1845: mod_base = OTHER; note = thymine
  modified_base 1848: mod_base = OTHER; note = thymine
  modified_base 1854: mod_base = OTHER; note = thymine
  modified_base 1857..1858: mod_base = OTHER; note = thymine
  modified_base 1860: mod_base = OTHER; note = thymine
  modified_base 1864: mod_base = OTHER; note = thymine
  modified_base 1866..1869: mod_base = OTHER; note = thymine
  modified_base 1872: mod_base = OTHER; note = thymine
  modified_base 1875: mod_base = OTHER; note = thymine
  modified_base 1881: mod_base = OTHER; note = thymine
  modified_base 1884..1885: mod_base = OTHER; note = thymine
  modified_base 1887: mod_base = OTHER; note = thymine
  modified_base 1890: mod_base = OTHER; note = thymine
  modified_base 1894: mod_base = OTHER; note = thymine
  modified_base 1903..1905: mod_base = OTHER; note = thymine
  modified_base 1911: mod_base = OTHER; note = thymine
  modified_base 1914: mod_base = OTHER; note = thymine
  modified_base 1916..1917: mod_base = OTHER; note = thymine
  modified_base 1923..1924: mod_base = OTHER; note = thymine
  modified_base 1926: mod_base = OTHER; note = thymine
  modified_base 1929..1932: mod_base = OTHER; note = thymine
  modified_base 1935: mod_base = OTHER; note = thymine
  modified_base 1938..1939: mod_base = OTHER; note = thymine
  modified_base 1941: mod_base = OTHER; note = thymine
  modified_base 1953: mod_base = OTHER; note = thymine
  modified_base 1955..1956: mod_base = OTHER; note = thymine
  modified_base 1958..1959: mod_base = OTHER; note = thymine
  modified_base 1961..1962: mod_base = OTHER; note = thymine
  modified_base 1969..1971: mod_base = OTHER; note = thymine
  modified_base 1974: mod_base = OTHER; note = thymine
  modified_base 1980: mod_base = OTHER; note = thymine
  modified_base 1983..1986: mod_base = OTHER; note = thymine
  modified_base 1995: mod_base = OTHER; note = thymine
  modified_base 1998: mod_base = OTHER; note = thymine
  modified_base 2000..2001: mod_base = OTHER; note = thymine
  modified_base 2004: mod_base = OTHER; note = thymine
  modified_base 2007: mod_base = OTHER; note = thymine
  modified_base 2010: mod_base = OTHER; note = thymine
  modified_base 2013..2014: mod_base = OTHER; note = thymine
  modified_base 2016: mod_base = OTHER; note = thymine
  modified_base 2018..2019: mod_base = OTHER; note = thymine
  modified_base 2022: mod_base = OTHER; note = thymine
  modified_base 2025..2028: mod_base = OTHER; note = thymine
  modified_base 2030..2032: mod_base = OTHER; note = thymine
  modified_base 2034: mod_base = OTHER; note = thymine
  modified_base 2038..2040: mod_base = OTHER; note = thymine
  modified_base 2042..2043: mod_base = OTHER; note = thymine
  modified_base 2046: mod_base = OTHER; note = thymine
  modified_base 2049: mod_base = OTHER; note = thymine
  modified_base 2052: mod_base = OTHER; note = thymine
  modified_base 2054: mod_base = OTHER; note = thymine
  modified_base 2058: mod_base = OTHER; note = thymine
  modified_base 2060..2061: mod_base = OTHER; note = thymine
  modified_base 2064: mod_base = OTHER; note = thymine
  modified_base 2067: mod_base = OTHER; note = thymine
  modified_base 2073: mod_base = OTHER; note = thymine
  modified_base 2082: mod_base = OTHER; note = thymine
  modified_base 2084..2088: mod_base = OTHER; note = thymine
  modified_base 2091..2092: mod_base = OTHER; note = thymine
  modified_base 2094: mod_base = OTHER; note = thymine
  modified_base 2097: mod_base = OTHER; note = thymine
  modified_base 2100: mod_base = OTHER; note = thymine
  modified_base 2105..2106: mod_base = OTHER; note = thymine
  modified_base 2109: mod_base = OTHER; note = thymine
  modified_base 2112: mod_base = OTHER; note = thymine
  modified_base 2114..2115: mod_base = OTHER; note = thymine
  modified_base 2117..2118: mod_base = OTHER; note = thymine
  modified_base 2121: mod_base = OTHER; note = thymine
  modified_base 2124..2128: mod_base = OTHER; note = thymine
  modified_base 2133: mod_base = OTHER; note = thymine
  modified_base 2135..2136: mod_base = OTHER; note = thymine
  modified_base 2139: mod_base = OTHER; note = thymine
  modified_base 2144..2145: mod_base = OTHER; note = thymine
  modified_base 2148: mod_base = OTHER; note = thymine
  modified_base 2151: mod_base = OTHER; note = thymine
  modified_base 2157: mod_base = OTHER; note = thymine
  modified_base 2160: mod_base = OTHER; note = thymine
  modified_base 2163: mod_base = OTHER; note = thymine
  modified_base 2166: mod_base = OTHER; note = thymine
  modified_base 2169: mod_base = OTHER; note = thymine
  modified_base 2172: mod_base = OTHER; note = thymine
  modified_base 2174..2175: mod_base = OTHER; note = thymine
  modified_base 2178: mod_base = OTHER; note = thymine
  modified_base 2181: mod_base = OTHER; note = thymine
  modified_base 2183..2184: mod_base = OTHER; note = thymine
  modified_base 2186..2187: mod_base = OTHER; note = thymine
  modified_base 2189..2190: mod_base = OTHER; note = thymine
  modified_base 2193..2194: mod_base = OTHER; note = thymine
  modified_base 2196..2197: mod_base = OTHER; note = thymine
  modified_base 2199: mod_base = OTHER; note = thymine
  modified_base 2202: mod_base = OTHER; note = thymine
  modified_base 2204..2205: mod_base = OTHER; note = thymine
  modified_base 2208: mod_base = OTHER; note = thymine
  modified_base 2210: mod_base = OTHER; note = thymine
  modified_base 2222..2223: mod_base = OTHER; note = thymine
  modified_base 2226: mod_base = OTHER; note = thymine
  modified_base 2229..2232: mod_base = OTHER; note = thymine
  modified_base 2234..2235: mod_base = OTHER; note = thymine
  modified_base 2238..2239: mod_base = OTHER; note = thymine
  modified_base 2241: mod_base = OTHER; note = thymine
  modified_base 2249: mod_base = OTHER; note = thymine
  modified_base 2253: mod_base = OTHER; note = thymine
  modified_base 2256..2259: mod_base = OTHER; note = thymine
  modified_base 2262: mod_base = OTHER; note = thymine
  modified_base 2265: mod_base = OTHER; note = thymine
  modified_base 2271: mod_base = OTHER; note = thymine
  modified_base 2273..2274: mod_base = OTHER; note = thymine
  modified_base 2277: mod_base = OTHER; note = thymine
  modified_base 2286: mod_base = OTHER; note = thymine
  modified_base 2289: mod_base = OTHER; note = thymine
  modified_base 2294..2295: mod_base = OTHER; note = thymine
  modified_base 2297..2298: mod_base = OTHER; note = thymine
  modified_base 2301: mod_base = OTHER; note = thymine
  modified_base 2310: mod_base = OTHER; note = thymine
  modified_base 2313..2316: mod_base = OTHER; note = thymine
  modified_base 2319: mod_base = OTHER; note = thymine
  modified_base 2325..2326: mod_base = OTHER; note = thymine
  modified_base 2332..2337: mod_base = OTHER; note = thymine
  modified_base 2340: mod_base = OTHER; note = thymine
  modified_base 2348..2349: mod_base = OTHER; note = thymine
  modified_base 2351: mod_base = OTHER; note = thymine
  modified_base 2354..2355: mod_base = OTHER; note = thymine
  modified_base 2358: mod_base = OTHER; note = thymine
  modified_base 2360..2364: mod_base = OTHER; note = thymine
  modified_base 2367: mod_base = OTHER; note = thymine
  modified_base 2373: mod_base = OTHER; note = thymine
  modified_base 2376: mod_base = OTHER; note = thymine
  modified_base 2379: mod_base = OTHER; note = thymine
  modified_base 2385: mod_base = OTHER; note = thymine
  modified_base 2389..2391: mod_base = OTHER; note = thymine
  modified_base 2400: mod_base = OTHER; note = thymine
  modified_base 2403: mod_base = OTHER; note = thymine
  modified_base 2406: mod_base = OTHER; note = thymine
  modified_base 2408..2409: mod_base = OTHER; note = thymine
  modified_base 2417..2418: mod_base = OTHER; note = thymine
  modified_base 2421: mod_base = OTHER; note = thymine
  modified_base 2424: mod_base = OTHER; note = thymine
  modified_base 2426..2427: mod_base = OTHER; note = thymine
  modified_base 2429..2430: mod_base = OTHER; note = thymine
  modified_base 2433: mod_base = OTHER; note = thymine
  modified_base 2441..2443: mod_base = OTHER; note = thymine
  modified_base 2445..2446: mod_base = OTHER; note = thymine
  modified_base 2448: mod_base = OTHER; note = thymine
  modified_base 2451: mod_base = OTHER; note = thymine
  modified_base 2454: mod_base = OTHER; note = thymine
  modified_base 2460: mod_base = OTHER; note = thymine
  modified_base 2462..2463: mod_base = OTHER; note = thymine
  modified_base 2466: mod_base = OTHER; note = thymine
  modified_base 2470: mod_base = OTHER; note = thymine
  modified_base 2472: mod_base = OTHER; note = thymine
  modified_base 2474..2475: mod_base = OTHER; note = thymine
  modified_base 2478: mod_base = OTHER; note = thymine
  modified_base 2481: mod_base = OTHER; note = thymine
  modified_base 2483..2487: mod_base = OTHER; note = thymine
  modified_base 2489..2491: mod_base = OTHER; note = thymine
  modified_base 2493: mod_base = OTHER; note = thymine
  modified_base 2496: mod_base = OTHER; note = thymine
  modified_base 2499: mod_base = OTHER; note = thymine
  modified_base 2502: mod_base = OTHER; note = thymine
  modified_base 2505: mod_base = OTHER; note = thymine
  modified_base 2508: mod_base = OTHER; note = thymine
  modified_base 2513: mod_base = OTHER; note = thymine
  modified_base 2515: mod_base = OTHER; note = thymine
  modified_base 2517: mod_base = OTHER; note = thymine
  modified_base 2520: mod_base = OTHER; note = thymine
  modified_base 2526: mod_base = OTHER; note = thymine
  modified_base 2529: mod_base = OTHER; note = thymine
  modified_base 2531: mod_base = OTHER; note = thymine
  modified_base 2538: mod_base = OTHER; note = thymine
  modified_base 2540..2541: mod_base = OTHER; note = thymine
  modified_base 2545: mod_base = OTHER; note = thymine
  modified_base 2547: mod_base = OTHER; note = thymine
  modified_base 2550: mod_base = OTHER; note = thymine
  modified_base 2556: mod_base = OTHER; note = thymine
  modified_base 2558..2559: mod_base = OTHER; note = thymine
  modified_base 2562: mod_base = OTHER; note = thymine
  modified_base 2568: mod_base = OTHER; note = thymine
  modified_base 2570..2572: mod_base = OTHER; note = thymine
  modified_base 2574: mod_base = OTHER; note = thymine
  modified_base 2576..2577: mod_base = OTHER; note = thymine
  modified_base 2579..2580: mod_base = OTHER; note = thymine
  modified_base 2583: mod_base = OTHER; note = thymine
  modified_base 2585..2586: mod_base = OTHER; note = thymine
  modified_base 2589: mod_base = OTHER; note = thymine
  modified_base 2591..2592: mod_base = OTHER; note = thymine
  modified_base 2595: mod_base = OTHER; note = thymine
  modified_base 2600..2601: mod_base = OTHER; note = thymine
  modified_base 2606..2607: mod_base = OTHER; note = thymine
  modified_base 2613: mod_base = OTHER; note = thymine
  modified_base 2615..2616: mod_base = OTHER; note = thymine
  modified_base 2624: mod_base = OTHER; note = thymine
  modified_base 2627..2628: mod_base = OTHER; note = thymine
  modified_base 2631: mod_base = OTHER; note = thymine
  modified_base 2634: mod_base = OTHER; note = thymine
  modified_base 2640: mod_base = OTHER; note = thymine
  modified_base 2646: mod_base = OTHER; note = thymine
  modified_base 2651..2653: mod_base = OTHER; note = thymine
  modified_base 2655: mod_base = OTHER; note = thymine
  modified_base 2661: mod_base = OTHER; note = thymine
  modified_base 2663..2664: mod_base = OTHER; note = thymine
  modified_base 2670: mod_base = OTHER; note = thymine
  modified_base 2673: mod_base = OTHER; note = thymine
  modified_base 2675..2676: mod_base = OTHER; note = thymine
  modified_base 2682: mod_base = OTHER; note = thymine
  modified_base 2685: mod_base = OTHER; note = thymine
  modified_base 2691: mod_base = OTHER; note = thymine
  modified_base 2694: mod_base = OTHER; note = thymine
  modified_base 2697: mod_base = OTHER; note = thymine
  modified_base 2700: mod_base = OTHER; note = thymine
  modified_base 2706..2709: mod_base = OTHER; note = thymine
  modified_base 2712: mod_base = OTHER; note = thymine
  modified_base 2718..2722: mod_base = OTHER; note = thymine
  modified_base 2724: mod_base = OTHER; note = thymine
  modified_base 2728: mod_base = OTHER; note = thymine
  modified_base 2730: mod_base = OTHER; note = thymine
  modified_base 2733: mod_base = OTHER; note = thymine
  modified_base 2739: mod_base = OTHER; note = thymine
  modified_base 2742: mod_base = OTHER; note = thymine
  modified_base 2745: mod_base = OTHER; note = thymine
  modified_base 2748: mod_base = OTHER; note = thymine
  modified_base 2751: mod_base = OTHER; note = thymine
  modified_base 2759..2760: mod_base = OTHER; note = thymine
  modified_base 2766: mod_base = OTHER; note = thymine
  modified_base 2768..2769: mod_base = OTHER; note = thymine
  modified_base 2772: mod_base = OTHER; note = thymine
  modified_base 2774..2775: mod_base = OTHER; note = thymine
  modified_base 2783..2784: mod_base = OTHER; note = thymine
  modified_base 2793: mod_base = OTHER; note = thymine
  modified_base 2796: mod_base = OTHER; note = thymine
  modified_base 2798..2800: mod_base = OTHER; note = thymine
  modified_base 2804..2805: mod_base = OTHER; note = thymine
  modified_base 2808: mod_base = OTHER; note = thymine
  modified_base 2811: mod_base = OTHER; note = thymine
  modified_base 2814: mod_base = OTHER; note = thymine
  modified_base 2817: mod_base = OTHER; note = thymine
  modified_base 2820: mod_base = OTHER; note = thymine
  modified_base 2822..2823: mod_base = OTHER; note = thymine
  modified_base 2826: mod_base = OTHER; note = thymine
  modified_base 2829: mod_base = OTHER; note = thymine
  modified_base 2832: mod_base = OTHER; note = thymine
  modified_base 2835: mod_base = OTHER; note = thymine
  modified_base 2838: mod_base = OTHER; note = thymine
  modified_base 2840: mod_base = OTHER; note = thymine
  modified_base 2843..2844: mod_base = OTHER; note = thymine
  modified_base 2847: mod_base = OTHER; note = thymine
  modified_base 2849..2850: mod_base = OTHER; note = thymine
  modified_base 2853: mod_base = OTHER; note = thymine
  modified_base 2855..2859: mod_base = OTHER; note = thymine
  modified_base 2868: mod_base = OTHER; note = thymine
  modified_base 2871: mod_base = OTHER; note = thymine
  modified_base 2875: mod_base = OTHER; note = thymine
  modified_base 2877..2878: mod_base = OTHER; note = thymine
  modified_base 2880: mod_base = OTHER; note = thymine
  modified_base 2882..2883: mod_base = OTHER; note = thymine
  modified_base 2885..2886: mod_base = OTHER; note = thymine
  modified_base 2889: mod_base = OTHER; note = thymine
  modified_base 2891..2893: mod_base = OTHER; note = thymine
  modified_base 2895..2896: mod_base = OTHER; note = thymine
  modified_base 2898..2899: mod_base = OTHER; note = thymine
  modified_base 2906..2907: mod_base = OTHER; note = thymine
  modified_base 2910: mod_base = OTHER; note = thymine
  modified_base 2916: mod_base = OTHER; note = thymine
  modified_base 2918..2919: mod_base = OTHER; note = thymine
  modified_base 2921..2922: mod_base = OTHER; note = thymine
  modified_base 2925: mod_base = OTHER; note = thymine
  modified_base 2928: mod_base = OTHER; note = thymine
  modified_base 2931: mod_base = OTHER; note = thymine
  modified_base 2934: mod_base = OTHER; note = thymine
  modified_base 2936..2937: mod_base = OTHER; note = thymine
  modified_base 2939..2940: mod_base = OTHER; note = thymine
  modified_base 2946: mod_base = OTHER; note = thymine
  modified_base 2952: mod_base = OTHER; note = thymine
  modified_base 2961..2962: mod_base = OTHER; note = thymine
  modified_base 2969..2970: mod_base = OTHER; note = thymine
  modified_base 2972..2973: mod_base = OTHER; note = thymine
  modified_base 2976: mod_base = OTHER; note = thymine
  modified_base 2979..2980: mod_base = OTHER; note = thymine
  modified_base 2982..2985: mod_base = OTHER; note = thymine
  modified_base 2988..2991: mod_base = OTHER; note = thymine
  modified_base 2995..2998: mod_base = OTHER; note = thymine
  modified_base 3000: mod_base = OTHER; note = thymine
  modified_base 3002..3003: mod_base = OTHER; note = thymine
  modified_base 3006: mod_base = OTHER; note = thymine
  modified_base 3009: mod_base = OTHER; note = thymine
  modified_base 3012: mod_base = OTHER; note = thymine
  modified_base 3015: mod_base = OTHER; note = thymine
  modified_base 3017..3018: mod_base = OTHER; note = thymine
  modified_base 3020..3021: mod_base = OTHER; note = thymine
  modified_base 3026..3027: mod_base = OTHER; note = thymine
  modified_base 3029..3030: mod_base = OTHER; note = thymine
  modified_base 3033: mod_base = OTHER; note = thymine
  modified_base 3042: mod_base = OTHER; note = thymine
  modified_base 3045: mod_base = OTHER; note = thymine
  modified_base 3047: mod_base = OTHER; note = thymine
  modified_base 3049..3051: mod_base = OTHER; note = thymine
  modified_base 3054..3055: mod_base = OTHER; note = thymine
  modified_base 3057..3060: mod_base = OTHER; note = thymine
  modified_base 3063..3064: mod_base = OTHER; note = thymine
  modified_base 3066..3067: mod_base = OTHER; note = thymine
  modified_base 3069: mod_base = OTHER; note = thymine
  modified_base 3072: mod_base = OTHER; note = thymine
  modified_base 3075: mod_base = OTHER; note = thymine
  modified_base 3078: mod_base = OTHER; note = thymine
  modified_base 3081: mod_base = OTHER; note = thymine
  modified_base 3084: mod_base = OTHER; note = thymine
  modified_base 3087: mod_base = OTHER; note = thymine
  modified_base 3089..3090: mod_base = OTHER; note = thymine
  modified_base 3093: mod_base = OTHER; note = thymine
  modified_base 3095..3096: mod_base = OTHER; note = thymine
  modified_base 3099: mod_base = OTHER; note = thymine
  modified_base 3101..3102: mod_base = OTHER; note = thymine
  modified_base 3105: mod_base = OTHER; note = thymine
  modified_base 3108: mod_base = OTHER; note = thymine
  modified_base 3110..3111: mod_base = OTHER; note = thymine
  modified_base 3114: mod_base = OTHER; note = thymine
  modified_base 3117: mod_base = OTHER; note = thymine
  modified_base 3122..3123: mod_base = OTHER; note = thymine
  modified_base 3126: mod_base = OTHER; note = thymine
  modified_base 3132: mod_base = OTHER; note = thymine
  modified_base 3135: mod_base = OTHER; note = thymine
  modified_base 3137..3138: mod_base = OTHER; note = thymine
  modified_base 3140..3141: mod_base = OTHER; note = thymine
  modified_base 3147: mod_base = OTHER; note = thymine
  modified_base 3149..3150: mod_base = OTHER; note = thymine
  modified_base 3153: mod_base = OTHER; note = thymine
  modified_base 3155..3156: mod_base = OTHER; note = thymine
  modified_base 3162: mod_base = OTHER; note = thymine
  modified_base 3165: mod_base = OTHER; note = thymine
  modified_base 3167..3169: mod_base = OTHER; note = thymine
  modified_base 3171..3174: mod_base = OTHER; note = thymine
  modified_base 3181: mod_base = OTHER; note = thymine
  modified_base 3183: mod_base = OTHER; note = thymine
  modified_base 3188..3189: mod_base = OTHER; note = thymine
  modified_base 3192: mod_base = OTHER; note = thymine
  modified_base 3197..3198: mod_base = OTHER; note = thymine
  modified_base 3201: mod_base = OTHER; note = thymine
  modified_base 3209..3210: mod_base = OTHER; note = thymine
  modified_base 3213: mod_base = OTHER; note = thymine
  modified_base 3216..3217: mod_base = OTHER; note = thymine
  modified_base 3219: mod_base = OTHER; note = thymine
  modified_base 3222: mod_base = OTHER; note = thymine
  modified_base 3224..3225: mod_base = OTHER; note = thymine
  modified_base 3234: mod_base = OTHER; note = thymine
  modified_base 3237: mod_base = OTHER; note = thymine
  modified_base 3240: mod_base = OTHER; note = thymine
  modified_base 3242..3243: mod_base = OTHER; note = thymine
  modified_base 3246: mod_base = OTHER; note = thymine
  misc_feature 1..3249: note = Synthetic
  source 1..3249: mol_type = other RNA
atggctgcttttaagcctaattctattaattatattcttggtcttgctattggtattgcttctgttggttgggctatggttgagattgatgaggaggagaatcctattcgtcttattgatcttggtgttcgtgtttttgagcgtgctgaggttcctaagactggtgattctcttgctatggctcgtcgtcttgctcgttctgttcgtcgtcttactcgtcgtcgtgctcatcgtcttcttcgtactcgtcgtcttcttaagcgtgagggtgttcttcaggctgctaattttgatgagaatggtcttattaagtctcttcctaatactccttggcagcttcgtgctgctgctcttgatcgtaagcttactcctcttgagtggtctgctgttcttcttcatcttattaagcatcgtggttatctttctcagcgtaagaatgagggtgagactgctgataaggagcttggtgctcttcttaagggtgttgctggtaatgctcatgctcttcagactggtgattttcgtactcctgctgagcttgctcttaataagtttgagaaggagtctggtcatattcgtaatcagcgttctgattattctcatactttttctcgtaaggatcttcaggctgagcttattcttctttttgagaagcagaaggagtttggtaatcctcatgtttctggtggtcttaaggagggtattgagactcttcttatgactcagcgtcctgctctttctggtgatgctgttcagaagatgcttggtcattgtacttttgagcctgctgagcctaaggctgctaagaatacttatactgctgagcgttttatttggcttactaagcttaataatcttcgtattcttgagcagggttctgagcgtcctcttactgatactgagcgtgctactcttatggatgagccttatcgtaagtctaagcttacttatgctcaggctcgtaagcttcttggtcttgaggatactgctttttttaagggtcttcgttatggtaaggataatgctgaggcttctactcttatggagatgaaggcttatcatgctatttctcgtgctcttgagaaggagggtcttaaggataagaagtctcctcttaatctttctcctgagcttcaggatgagattggtactgctttttctctttttaagactgatgaggatattactggtcgtcttaaggatcgtattcagcctgagattcttgaggctcttcttaagcatatttcttttgataagtttgttcagatttctcttaaggctcttcgtcgtattgttcctcttatggagcagggtaagcgttatgatgaggcttgtgctgagatttatggtgatcattatggtaagaagaatactgaggagaagatttatcttcctcctattcctgctgatgagattcgtaatcctgttgttcttcgtgctctttctcaggctcgtaaggttattaatggtgttgttcgtcgttatggttctcctgctcgtattcatattgagactgctcgtgaggttggtaagtcttttaaggatcgtaaggagattgagaagcgtcaggaggagaatcgtaaggatcgtgagaaggctgctgctaagtttcgtgagtattttcctaattttgttggtgagcctaagtctaaggatattcttaagcttcgtctttatgagcagcagcatggtaagtgtctttattctggtaaggagattaatcttggtcgtcttaatgagaagggttatgttgagattgatgctgctcttcctttttctcgtacttgggatgattcttttaataataaggttcttgttcttggttctgagaatcagaataagggtaatcagactccttatgagtattttaatggtaaggataattctcgtgagtggcaggagtttaaggctcgtgttgagacttctcgttttcctcgttctaagaagcagcgtattcttcttcagaagtttgatgaggatggttttaaggagcgtaatcttaatgatactcgttatgttaatcgttttctttgtcagtttgttgctgatcgtatgcgtcttactggtaagggtaagaagcgtgtttttgcttctaatggtcagattactaatcttcttcgtggtttttggggtcttcgtaaggttcgtgctgagaatgatcgtcatcatgctcttgatgctgttgttgttgcttgttctactgttgctatgcagcagaagattactcgttttgttcgttataaggagatgaatgcttttgatggtaagactattgataaggagactggtgaggttcttcatcagaagactcattttcctcagccttgggagttttttgctcaggaggttatgattcgtgtttttggtaagcctgatggtaagcctgagtttgaggaggctgatactcttgagaagcttcgtactcttcttgctgagaagctttcttctcgtcctgaggctgttcatgagtatgttactcctctttttgtttctcgtgctcctaatcgtaagatgtctggtcagggtcatatggagactgttaagtctgctaagcgtcttgatgagggtgtttctgttcttcgtgttcctcttactcagcttaagcttaaggatcttgagaagatggttaatcgtgagcgtgagcctaagctttatgaggctcttaaggctcgtcttgaggctcataaggatgatcctgctaaggcttttgctgagcctttttataagtatgataaggctggtaatcgtactcagcaggttaaggctgttcgtgttgagcaggttcagaagactggtgtttgggttcgtaatcataatggtattgctgataatgctactatggttcgtgttgatgtttttgagaagggtgataagtattatcttgttcctatttattcttggcaggttgctaagggtattcttcctgatcgtgctgttgttcagggtaaggatgaggaggattggcagcttattgatgattcttttaattttaagttttctcttcatcctaatgatcttgttgaggttattactaagaaggctcgtatgtttggttattttgcttcttgtcatcgtggtactggtaatattaatattcgtattcatgatcttgatcataagattggtaagaatggtattcttgagggtattggtgttaagactgctctttcttttcagaagtatcagattgatgagcttggtaaggagattcgtccttgtcgtcttaagaagcgtcctcctgttcgttga

SEQ ID NO: 232 - RNA, 3249 nt, synthetic construct
  modified_base 2: mod_base = OTHER; note = thymine
  modified_base 10..11: mod_base = OTHER; note = thymine
  modified_base 22: mod_base = OTHER; note = thymine
  modified_base 26: mod_base = OTHER; note = thymine
  modified_base 31: mod_base = OTHER; note = thymine
  modified_base 35: mod_base = OTHER; note = thymine
  modified_base 38: mod_base = OTHER; note = thymine
  modified_base 44: mod_base = OTHER; note = thymine
  modified_base 50: mod_base = OTHER; note = thymine
  modified_base 56: mod_base = OTHER; note = thymine
  modified_base 61: mod_base = OTHER; note = thymine
  modified_base 65: mod_base = OTHER; note = thymine
  modified_base 70: mod_base = OTHER; note = thymine
  modified_base 77: mod_base = OTHER; note = thymine
  modified_base 80: mod_base = OTHER; note = thymine
  modified_base 86: mod_base = OTHER; note = thymine
  modified_base 107: mod_base = OTHER; note = thymine
  modified_base 113: mod_base = OTHER; note = thymine
  modified_base 116: mod_base = OTHER; note = thymine
  modified_base 122: mod_base = OTHER; note = thymine
  modified_base 128: mod_base = OTHER; note = thymine
  modified_base 134: mod_base = OTHER; note = thymine
  modified_base 136..137: mod_base = OTHER; note = thymine
  modified_base 152: mod_base = OTHER; note = thymine
  modified_base 169: mod_base = OTHER; note = thymine
  modified_base 173: mod_base = OTHER; note = thymine
  modified_base 179: mod_base = OTHER; note = thymine
  modified_base 191: mod_base = OTHER; note = thymine
  modified_base 199: mod_base = OTHER; note = thymine
  modified_base 203: mod_base = OTHER; note = thymine
  modified_base 212: mod_base = OTHER; note = thymine
  modified_base 236: mod_base = OTHER; note = thymine
  modified_base 239: mod_base = OTHER; note = thymine
  modified_base 254: mod_base = OTHER; note = thymine
  modified_base 257: mod_base = OTHER; note = thymine
  modified_base 272: mod_base = OTHER; note = thymine
  modified_base 275: mod_base = OTHER; note = thymine
  modified_base 289..290: mod_base = OTHER; note = thymine
  modified_base 305: mod_base = OTHER; note = thymine
  modified_base 308: mod_base = OTHER; note = thymine
  modified_base 313: mod_base = OTHER; note = thymine
  modified_base 317: mod_base = OTHER; note = thymine
  modified_base 331: mod_base = OTHER; note = thymine
  modified_base 338: mod_base = OTHER; note = thymine
  modified_base 353: mod_base = OTHER; note = thymine
  modified_base 365: mod_base = OTHER; note = thymine
  modified_base 374: mod_base = OTHER; note = thymine
  modified_base 379: mod_base = OTHER; note = thymine
  modified_base 382: mod_base = OTHER; note = thymine
  modified_base 389: mod_base = OTHER; note = thymine
  modified_base 392: mod_base = OTHER; note = thymine
  modified_base 395: mod_base = OTHER; note = thymine
  modified_base 401: mod_base = OTHER; note = thymine
  modified_base 404: mod_base = OTHER; note = thymine
  modified_base 418: mod_base = OTHER; note = thymine
  modified_base 422: mod_base = OTHER; note = thymine
  modified_base 424: mod_base = OTHER; note = thymine
  modified_base 464: mod_base = OTHER; note = thymine
  modified_base 473: mod_base = OTHER; note = thymine
  modified_base 476: mod_base = OTHER; note = thymine
  modified_base 485: mod_base = OTHER; note = thymine
  modified_base 506: mod_base = OTHER; note = thymine
  modified_base 520..521: mod_base = OTHER; note = thymine
  modified_base 539: mod_base = OTHER; note = thymine
  modified_base 545: mod_base = OTHER; note = thymine
  modified_base 553..554: mod_base = OTHER; note = thymine
  modified_base 565: mod_base = OTHER; note = thymine
  modified_base 575: mod_base = OTHER; note = thymine
  modified_base 589: mod_base = OTHER; note = thymine
  modified_base 595: mod_base = OTHER; note = thymine
  modified_base 598: mod_base = OTHER; note = thymine
  modified_base 607..608: mod_base = OTHER; note = thymine
  modified_base 610: mod_base = OTHER; note = thymine
  modified_base 623: mod_base = OTHER; note = thymine
  modified_base 635: mod_base = OTHER; note = thymine
  modified_base 638: mod_base = OTHER; note = thymine
  modified_base 641: mod_base = OTHER; note = thymine
  modified_base 644: mod_base = OTHER; note = thymine
  modified_base 646..647: mod_base = OTHER; note = thymine
  modified_base 664..665: mod_base = OTHER; note = thymine
  modified_base 680: mod_base = OTHER; note = thymine
  modified_base 682: mod_base = OTHER; note = thymine
  modified_base 692: mod_base = OTHER; note = thymine
  modified_base 704: mod_base = OTHER; note = thymine
  modified_base 713: mod_base = OTHER; note = thymine
  modified_base 716: mod_base = OTHER; note = thymine
  modified_base 719: mod_base = OTHER; note = thymine
  modified_base 737: mod_base = OTHER; note = thymine
  modified_base 739: mod_base = OTHER; note = thymine
  modified_base 752: mod_base = OTHER; note = thymine
  modified_base 761: mod_base = OTHER; note = thymine
  modified_base 764: mod_base = OTHER; note = thymine
  modified_base 772: mod_base = OTHER; note = thymine
  modified_base 778..779: mod_base = OTHER; note = thymine
  modified_base 814: mod_base = OTHER; note = thymine
  modified_base 829..830: mod_base = OTHER; note = thymine
  modified_base 833: mod_base = OTHER; note = thymine
  modified_base 835: mod_base = OTHER; note = thymine
  modified_base 839: mod_base = OTHER; note = thymine
  modified_base 848: mod_base = OTHER; note = thymine
  modified_base 857: mod_base = OTHER; note = thymine
  modified_base 863: mod_base = OTHER; note = thymine
  modified_base 866: mod_base = OTHER; note = thymine
  modified_base 877: mod_base = OTHER; note = thymine
  modified_base 890: mod_base = OTHER; note = thymine
  modified_base 914: mod_base = OTHER; note = thymine
  modified_base 917: mod_base = OTHER; note = thymine
  modified_base 928: mod_base = OTHER; note = thymine
  modified_base 937: mod_base = OTHER; note = thymine
  modified_base 944: mod_base = OTHER; note = thymine
  modified_base 949: mod_base = OTHER; note = thymine
  modified_base 968: mod_base = OTHER; note = thymine
  modified_base 971: mod_base = OTHER; note = thymine
  modified_base 977: mod_base = OTHER; note = thymine
  modified_base 991..992: mod_base = OTHER; note = thymine
  modified_base 994..995: mod_base = OTHER; note = thymine
  modified_base 1004: mod_base = OTHER; note = thymine
  modified_base 1009: mod_base = OTHER; note = thymine
  modified_base 1033: mod_base = OTHER; note = thymine
  modified_base 1040: mod_base = OTHER; note = thymine
  modified_base 1043: mod_base = OTHER; note = thymine
  modified_base 1049: mod_base = OTHER; note = thymine
  modified_base 1057: mod_base = OTHER; note = thymine
  modified_base 1067: mod_base = OTHER; note = thymine
  modified_base 1069: mod_base = OTHER; note = thymine
  modified_base 1079: mod_base = OTHER; note = thymine
  modified_base 1094: mod_base = OTHER; note = thymine
  modified_base 1108: mod_base = OTHER; note = thymine
  modified_base 1115: mod_base = OTHER; note = thymine
  modified_base 1121: mod_base = OTHER; note = thymine
  modified_base 1123: mod_base = OTHER; note = thymine
  modified_base 1133: mod_base = OTHER; note = thymine
  modified_base 1145: mod_base = OTHER; note = thymine
  modified_base 1156..1157: mod_base = OTHER; note = thymine
  modified_base 1159: mod_base = OTHER; note = thymine
  modified_base 1163: mod_base = OTHER; note = thymine
  modified_base 1165..1166: mod_base = OTHER; note = thymine
  modified_base 1184: mod_base = OTHER; note = thymine
  modified_base 1196: mod_base = OTHER; note = thymine
  modified_base 1208: mod_base = OTHER; note = thymine
  modified_base 1220: mod_base = OTHER; note = thymine
  modified_base 1223: mod_base = OTHER; note = thymine
  modified_base 1232: mod_base = OTHER; note = thymine
  modified_base 1235: mod_base = OTHER; note = thymine
  modified_base 1244: mod_base = OTHER; note = thymine
  modified_base 1246: mod_base = OTHER; note = thymine
  modified_base 1249..1250: mod_base = OTHER; note = thymine
  modified_base 1258..1259: mod_base = OTHER; note = thymine
  modified_base 1262: mod_base = OTHER; note = thymine
  modified_base 1268: mod_base = OTHER; note = thymine
  modified_base 1270: mod_base = OTHER; note = thymine
  modified_base 1274: mod_base = OTHER; note = thymine
  modified_base 1283: mod_base = OTHER; note = thymine
  modified_base 1292: mod_base = OTHER; note = thymine
  modified_base 1295: mod_base = OTHER; note = thymine
  modified_base 1301: mod_base = OTHER; note = thymine
  modified_base 1304: mod_base = OTHER; note = thymine
  modified_base 1321: mod_base = OTHER; note = thymine
  modified_base 1333: mod_base = OTHER; note = thymine
  modified_base 1343: mod_base = OTHER; note = thymine
  modified_base 1345: mod_base = OTHER; note = thymine
  modified_base 1357: mod_base = OTHER; note = thymine
  modified_base 1385: mod_base = OTHER; note = thymine
  modified_base 1387: mod_base = OTHER; note = thymine
  modified_base 1391: mod_base = OTHER; note = thymine
  modified_base 1400: mod_base = OTHER; note = thymine
  modified_base 1415: mod_base = OTHER; note = thymine
  modified_base 1427: mod_base = OTHER; note = thymine
  modified_base 1430: mod_base = OTHER; note = thymine
  modified_base 1433: mod_base = OTHER; note = thymine
  modified_base 1442: mod_base = OTHER; note = thymine
  modified_base 1444: mod_base = OTHER; note = thymine
  modified_base 1460: mod_base = OTHER; note = thymine
  modified_base 1463: mod_base = OTHER; note = thymine
  modified_base 1472: mod_base = OTHER; note = thymine
  modified_base 1475: mod_base = OTHER; note = thymine
  modified_base 1483: mod_base = OTHER; note = thymine
  modified_base 1489: mod_base = OTHER; note = thymine
  modified_base 1502: mod_base = OTHER; note = thymine
  modified_base 1508: mod_base = OTHER; note = thymine
  modified_base 1526: mod_base = OTHER; note = thymine
  modified_base 1534: mod_base = OTHER; note = thymine
  modified_base 1537..1538: mod_base = OTHER; note = thymine
  modified_base 1556: mod_base = OTHER; note = thymine
  modified_base 1609..1610: mod_base = OTHER; note = thymine
  modified_base 1618: mod_base = OTHER; note = thymine
  modified_base 1621..1622: mod_base = OTHER; note = thymine
  modified_base 1630..1631: mod_base = OTHER; note = thymine
  modified_base 1634: mod_base = OTHER; note = thymine
  modified_base 1648: mod_base = OTHER; note = thymine
  modified_base 1658: mod_base = OTHER; note = thymine
  modified_base 1661: mod_base = OTHER; note = thymine
  modified_base 1667: mod_base = OTHER; note = thymine
  modified_base 1673: mod_base = OTHER; note = thymine
  modified_base 1675: mod_base = OTHER; note = thymine
  modified_base 1696: mod_base = OTHER; note = thymine
  modified_base 1700: mod_base = OTHER; note = thymine
  modified_base 1702: mod_base = OTHER; note = thymine
  modified_base 1705: mod_base = OTHER; note = thymine
  modified_base 1718: mod_base = OTHER; note = thymine
  modified_base 1724: mod_base = OTHER; note = thymine
  modified_base 1733: mod_base = OTHER; note = thymine
  modified_base 1747: mod_base = OTHER; note = thymine
  modified_base 1751: mod_base = OTHER; note = thymine
  modified_base 1757: mod_base = OTHER; note = thymine
  modified_base 1769: mod_base = OTHER; note = thymine
  modified_base 1774..1775: mod_base = OTHER; note = thymine
  modified_base 1777: mod_base = OTHER; note = thymine
  modified_base 1786: mod_base = OTHER; note = thymine
  modified_base 1795: mod_base = OTHER; note = thymine
  modified_base 1798..1799: mod_base = OTHER; note = thymine
  modified_base 1811: mod_base = OTHER; note = thymine
  modified_base 1814: mod_base = OTHER; note = thymine
  modified_base 1817: mod_base = OTHER; note = thymine
  modified_base 1820: mod_base = OTHER; note = thymine
  modified_base 1825: mod_base = OTHER; note = thymine
  modified_base 1858: mod_base = OTHER; note = thymine
  modified_base 1864: mod_base = OTHER; note = thymine
  modified_base 1867..1868: mod_base = OTHER; note = thymine
  modified_base 1885: mod_base = OTHER; note = thymine
  modified_base 1894: mod_base = OTHER; note = thymine
  modified_base 1903..1904: mod_base = OTHER; note = thymine
  modified_base 1916: mod_base = OTHER; note = thymine
  modified_base 1924: mod_base = OTHER; note = thymine
  modified_base 1930..1931: mod_base = OTHER; note = thymine
  modified_base 1939: mod_base = OTHER; note = thymine
  modified_base 1955: mod_base = OTHER; note = thymine
  modified_base 1958: mod_base = OTHER; note = thymine
  modified_base 1961: mod_base = OTHER; note = thymine
  modified_base 1969..1970: mod_base = OTHER; note = thymine
  modified_base 1984..1985: mod_base = OTHER; note = thymine
  modified_base 2000: mod_base = OTHER; note = thymine
  modified_base 2014: mod_base = OTHER; note = thymine
  modified_base 2018: mod_base = OTHER; note = thymine
  modified_base 2026..2027: mod_base = OTHER; note = thymine
  modified_base 2030: mod_base = OTHER; note = thymine
  modified_base 2032: mod_base = OTHER; note = thymine
  modified_base 2038..2039: mod_base = OTHER; note = thymine
  modified_base 2042: mod_base = OTHER; note = thymine
  modified_base 2054: mod_base = OTHER; note = thymine
  modified_base 2060: mod_base = OTHER; note = thymine
  modified_base 2084: mod_base = OTHER; note = thymine
  modified_base 2086..2087: mod_base = OTHER; note = thymine
  modified_base 2092: mod_base = OTHER; note = thymine
  modified_base 2105: mod_base = OTHER; note = thymine
  modified_base 2114: mod_base = OTHER; note = thymine
  modified_base 2117: mod_base = OTHER; note = thymine
  modified_base 2125..2126: mod_base = OTHER; note = thymine
  modified_base 2128: mod_base = OTHER; note = thymine
  modified_base 2135: mod_base = OTHER; note = thymine
  modified_base 2144: mod_base = OTHER; note = thymine
  modified_base 2174: mod_base = OTHER; note = thymine
  modified_base 2183: mod_base = OTHER; note = thymine
  modified_base 2186: mod_base = OTHER; note = thymine
  modified_base 2189: mod_base = OTHER; note = thymine
  modified_base 2194: mod_base = OTHER; note = thymine
  modified_base 2197: mod_base = OTHER; note = thymine
  modified_base 2204: mod_base = OTHER; note = thymine
  modified_base 2210: mod_base = OTHER; note = thymine
  modified_base 2222: mod_base = OTHER; note = thymine
  modified_base 2230..2231: mod_base = OTHER; note = thymine
  modified_base 2234: mod_base = OTHER; note = thymine
  modified_base 2239: mod_base = OTHER; note = thymine
  modified_base 2249: mod_base = OTHER; note = thymine
  modified_base 2257..2258: mod_base = OTHER; note = thymine
  modified_base 2273: mod_base = OTHER; note = thymine
  modified_base 2294: mod_base = OTHER; note = thymine
  modified_base 2297: mod_base = OTHER; note = thymine
  modified_base 2314..2315: mod_base = OTHER; note = thymine
  modified_base 2326: mod_base = OTHER; note = thymine
  modified_base 2332..2333: mod_base = OTHER; note = thymine
  modified_base 2335..2336: mod_base = OTHER; note = thymine
  modified_base 2348: mod_base = OTHER; note = thymine
  modified_base 2351: mod_base = OTHER; note = thymine
  modified_base 2354: mod_base = OTHER; note = thymine
  modified_base 2360: mod_base = OTHER; note = thymine
  modified_base 2362..2363: mod_base = OTHER; note = thymine
  modified_base 2389..2390: mod_base = OTHER; note = thymine
  modified_base 2408: mod_base = OTHER; note = thymine
  modified_base 2417: mod_base = OTHER; note = thymine
  modified_base 2426: mod_base = OTHER; note = thymine
  modified_base 2429: mod_base = OTHER; note = thymine
  modified_base 2441: mod_base = OTHER; note = thymine
  modified_base 2443: mod_base = OTHER; note = thymine
  modified_base 2446: mod_base = OTHER; note = thymine
  modified_base 2462: mod_base = OTHER; note = thymine
  modified_base 2470: mod_base = OTHER; note = thymine
  modified_base 2474: mod_base = OTHER; note = thymine
  modified_base 2483: mod_base = OTHER; note = thymine
  modified_base 2485..2486: mod_base = OTHER; note = thymine
  modified_base 2489: mod_base = OTHER; note = thymine
  modified_base 2491: mod_base = OTHER; note = thymine
  modified_base 2513: mod_base = OTHER; note = thymine
  modified_base 2515: mod_base = OTHER; note = thymine
  modified_base 2531: mod_base = OTHER; note = thymine
  modified_base 2540: mod_base = OTHER; note = thymine
  modified_base 2545: mod_base = OTHER; note = thymine
  modified_base 2558: mod_base = OTHER; note = thymine
  modified_base 2570: mod_base = OTHER; note = thymine
  modified_base 2572: mod_base = OTHER; note = thymine
  modified_base 2576: mod_base = OTHER; note = thymine
  modified_base 2579: mod_base = OTHER; note = thymine
  modified_base 2585: mod_base = OTHER; note = thymine
  modified_base 2591: mod_base = OTHER; note = thymine
  modified_base 2600: mod_base = OTHER; note = thymine
  modified_base 2606: mod_base = OTHER; note = thymine
  modified_base 2615: mod_base = OTHER; note = thymine
  modified_base 2624: mod_base = OTHER; note = thymine
  modified_base 2627: mod_base = OTHER; note = thymine
  modified_base 2651: mod_base = OTHER; note = thymine
  modified_base 2653: mod_base = OTHER; note = thymine
  modified_base 2663: mod_base = OTHER; note = thymine
  modified_base 2675: mod_base = OTHER; note = thymine
  modified_base 2707..2708: mod_base = OTHER; note = thymine
  modified_base 2719..2720: mod_base = OTHER; note = thymine
  modified_base 2722: mod_base = OTHER; note = thymine
  modified_base 2728: mod_base = OTHER; note = thymine
  modified_base 2759: mod_base = OTHER; note = thymine
  modified_base 2768: mod_base = OTHER; note = thymine
  modified_base 2774: mod_base = OTHER; note = thymine
  modified_base 2783: mod_base = OTHER; note = thymine
  modified_base 2798: mod_base = OTHER; note = thymine
  modified_base 2800: mod_base = OTHER; note = thymine
  modified_base 2804: mod_base = OTHER; note = thymine
  modified_base 2822: mod_base = OTHER; note = thymine
  modified_base 2840: mod_base = OTHER; note = thymine
  modified_base 2843: mod_base = OTHER; note = thymine
  modified_base 2849: mod_base = OTHER; note = thymine
  modified_base 2855: mod_base = OTHER; note = thymine
  modified_base 2857..2858: mod_base = OTHER; note = thymine
  modified_base 2875: mod_base = OTHER; note = thymine
  modified_base 2878: mod_base = OTHER; note = thymine
  modified_base 2882: mod_base = OTHER; note = thymine
  modified_base 2885: mod_base = OTHER; note = thymine
  modified_base 2891: mod_base = OTHER; note = thymine
  modified_base 2893: mod_base = OTHER; note = thymine
  modified_base 2896: mod_base = OTHER; note = thymine
  modified_base 2899: mod_base = OTHER; note = thymine
  modified_base 2906: mod_base = OTHER; note = thymine
  modified_base 2918: mod_base = OTHER; note = thymine
  modified_base 2921: mod_base = OTHER; note = thymine
  modified_base 2936: mod_base = OTHER; note = thymine
  modified_base 2939: mod_base = OTHER; note = thymine
  modified_base 2962: mod_base = OTHER; note = thymine
  modified_base 2969: mod_base = OTHER; note = thymine
  modified_base 2972: mod_base = OTHER; note = thymine
  modified_base 2980: mod_base = OTHER; note = thymine
  modified_base 2983..2984: mod_base = OTHER; note = thymine
  modified_base 2989..2990: mod_base = OTHER; note = thymine
  modified_base 2995..2996: mod_base = OTHER; note = thymine
  modified_base 2998: mod_base = OTHER; note = thymine
  modified_base 3002: mod_base = OTHER; note = thymine
  modified_base 3017: mod_base = OTHER; note = thymine
  modified_base 3020: mod_base = OTHER; note = thymine
  modified_base 3026: mod_base = OTHER; note = thymine
  modified_base 3029: mod_base = OTHER; note = thymine
  modified_base 3047: mod_base = OTHER; note = thymine
  modified_base 3049..3050: mod_base = OTHER; note = thymine
  modified_base 3055: mod_base = OTHER; note = thymine
  modified_base 3058..3059: mod_base = OTHER; note = thymine
  modified_base 3064: mod_base = OTHER; note = thymine
  modified_base 3067: mod_base = OTHER; note = thymine
  modified_base 3089: mod_base = OTHER; note = thymine
  modified_base 3095: mod_base = OTHER; note = thymine
  modified_base 3101: mod_base = OTHER; note = thymine
  modified_base 3110: mod_base = OTHER; note = thymine
  modified_base 3122: mod_base = OTHER; note = thymine
  modified_base 3137: mod_base = OTHER; note = thymine
  modified_base 3140: mod_base = OTHER; note = thymine
  modified_base 3149: mod_base = OTHER; note = thymine
  modified_base 3155: mod_base = OTHER; note = thymine
  modified_base 3167: mod_base = OTHER; note = thymine
  modified_base 3169: mod_base = OTHER; note = thymine
  modified_base 3172..3173: mod_base = OTHER; note = thymine
  modified_base 3181: mod_base = OTHER; note = thymine
  modified_base 3188: mod_base = OTHER; note = thymine
  modified_base 3197: mod_base = OTHER; note = thymine
  modified_base 3209: mod_base = OTHER; note = thymine
  modified_base 3217: mod_base = OTHER; note = thymine
  modified_base 3224: mod_base = OTHER; note = thymine
  modified_base 3242: mod_base = OTHER; note = thymine
  misc_feature 1..3249: note = Synthetic
  source 1..3249: mol_type = other RNA
atggccgccttcaagcccaactccatcaactacatcctgggcctggccatcggcatcgcctccgtgggctgggccatggtggagatcgacgaggaggagaaccccatccggctgatcgacctgggcgtgcgggtgttcgagcgggccgaggtgcccaagaccggcgactccctggccatggcccggcggctggcccggtccgtgcggcggctgacccggcggcgggcccaccggctgctgcggacccggcggctgctgaagcgggagggcgtgctgcaggccgccaacttcgacgagaacggcctgatcaagtccctgcccaacaccccctggcagctgcgggccgccgccctggaccggaagctgacccccctggagtggtccgccgtgctgctgcacctgatcaagcaccggggctacctgtcccagcggaagaacgagggcgagaccgccgacaaggagctgggcgccctgctgaagggcgtggccggcaacgcccacgccctgcagaccggcgacttccggacccccgccgagctggccctgaacaagttcgagaaggagtccggccacatccggaaccagcggtccgactactcccacaccttctcccggaaggacctgcaggccgagctgatcctgctgttcgagaagcagaaggagttcggcaacccccacgtgtccggcggcctgaaggagggcatcgagaccctgctgatgacccagcggcccgccctgtccggcgacgccgtgcagaagatgctgggccactgcaccttcgagcccgccgagcccaaggccgccaagaacacctacaccgccgagcggttcatctggctgaccaagctgaacaacctgcggatcctggagcagggctccgagcggcccctgaccgacaccgagcgggccaccctgatggacgagccctaccggaagtccaagctgacctacgcccaggcccggaagctgctgggcctggaggacaccgccttcttcaagggcctgcggtacggcaaggacaacgccgaggcctccaccctgatggagatgaaggcctaccacgccatctcccgggccctggagaaggagggcctgaaggacaagaagtcccccctgaacctgtcccccgagctgcaggacgagatcggcaccgccttctccctgttcaagaccgacgaggacatcaccggccggctgaaggaccggatccagcccgagatcctggaggccctgctgaagcacatctccttcgacaagttcgtgcagatctccctgaaggccctgcggcggatcgtgcccctgatggagcagggcaagcggtacgacgaggcctgcgccgagatctacggcgaccactacggcaagaagaacaccgaggagaagatctacctgccccccatccccgccgacgagatccggaaccccgtggtgctgcgggccctgtcccaggcccggaaggtgatcaacggcgtggtgcggcggtacggctcccccgcccggatccacatcgagaccgcccgggaggtgggcaagtccttcaaggaccggaaggagatcgagaagcggcaggaggagaaccggaaggaccgggagaaggccgccgccaagttccgggagtacttccccaacttcgtgggcgagcccaagtccaaggacatcctgaagctgcggctgtacgagcagcagcacggcaagtgcctgtactccggcaaggagatcaacctgggccggctgaacgagaagggctacgtggagatcgacgccgccctgcccttctcccggacctgggacgactccttcaacaacaaggtgctggtgctgggctccgagaaccagaacaagggcaaccagaccccctacgagtacttcaacggcaaggacaactcccgggagtggcaggagttcaaggcccgggtggagacctcccggttcccccggtccaagaagcagcggatcctgctgcagaagttcgacgaggacggcttcaaggagcggaacctgaacgacacccggtacgtgaaccggttcctgtgccagttcgtggccgaccggatgcggctgaccggcaagggcaagaagcgggtgttcgcctccaacggccagatcaccaacctgctgcggggcttctggggcctgcggaaggtgcgggccgagaacgaccggcaccacgccctggacgccgtggtggtggcctgctccaccgtggccatgcagcagaagatcacccggttcgtgcggtacaaggagatgaacgccttcgacggcaagaccatcgacaaggagaccggcgaggtgctgcaccagaagacccacttcccccagccctgggagttcttcgcccaggaggtgatgatccgggtgttcggcaagcccgacggcaagcccgagttcgaggaggccgacaccctggagaagctgcggaccctgctggccgagaagctgtcctcccggcccgaggccgtgcacgagtacgtgacccccctgttcgtgtcccgggcccccaaccggaagatgtccggccagggccacatggagaccgtgaagtccgccaagcggctggacgagggcgtgtccgtgctgcgggtgcccctgacccagctgaagctgaaggacctggagaagatggtgaaccgggagcgggagcccaagctgtacgaggccctgaaggcccggctggaggcccacaaggacgaccccgccaaggccttcgccgagcccttctacaagtacgacaaggccggcaaccggacccagcaggtgaaggccgtgcgggtggagcaggtgcagaagaccggcgtgtgggtgcggaaccacaacggcatcgccgacaacgccaccatggtgcgggtggacgtgttcgagaagggcgacaagtactacctggtgcccatctactcctggcaggtggccaagggcatcctgcccgaccgggccgtggtgcagggcaaggacgaggaggactggcagctgatcgacgactccttcaacttcaagttctccctgcaccccaacgacctggtggaggtgatcaccaagaaggcccggatgttcggctacttcgcctcctgccaccggggcaccggcaacatcaacatccggatccacgacctggaccacaagatcggcaagaacggcatcctggagggcatcggcgtgaagaccgccctgtccttccagaagtaccagatcgacgagctgggcaaggagatccggccctgccggctgaagaagcggccccccgtgcggtga

SEQ ID NO: 233 - RNA, 3249 nt, synthetic construct
  modified_base 2: mod_base = OTHER; note = thymine
  modified_base 10..11: mod_base = OTHER; note = thymine
  modified_base 22: mod_base = OTHER; note = thymine
  modified_base 26: mod_base = OTHER; note = thymine
  modified_base 31: mod_base = OTHER; note = thymine
  modified_base 35: mod_base = OTHER; note = thymine
  modified_base 38: mod_base = OTHER; note = thymine
  modified_base 44: mod_base = OTHER; note = thymine
  modified_base 50: mod_base = OTHER; note = thymine
  modified_base 56: mod_base = OTHER; note = thymine
  modified_base 61: mod_base = OTHER; note = thymine
  modified_base 65: mod_base = OTHER; note = thymine
  modified_base 70: mod_base = OTHER; note = thymine
  modified_base 77: mod_base = OTHER; note = thymine
  modified_base 80: mod_base = OTHER; note = thymine
  modified_base 86: mod_base = OTHER; note = thymine
  modified_base 107: mod_base = OTHER; note = thymine
  modified_base 113: mod_base = OTHER; note = thymine
  modified_base 116: mod_base = OTHER; note = thymine
  modified_base 122: mod_base = OTHER; note = thymine
  modified_base 128: mod_base = OTHER; note = thymine
  modified_base 134: mod_base = OTHER; note = thymine
  modified_base 136..137: mod_base = OTHER; note = thymine
  modified_base 152: mod_base = OTHER; note = thymine
  modified_base 169: mod_base = OTHER; note = thymine
  modified_base 173: mod_base = OTHER; note = thymine
  modified_base 179: mod_base = OTHER; note = thymine
  modified_base 191: mod_base = OTHER; note = thymine
  modified_base 199: mod_base = OTHER; note = thymine
  modified_base 203: mod_base = OTHER; note = thymine
  modified_base 212: mod_base = OTHER; note = thymine
  modified_base 236: mod_base = OTHER; note = thymine
  modified_base 239: mod_base = OTHER; note = thymine
  modified_base 254: mod_base = OTHER; note = thymine
  modified_base 257: mod_base = OTHER; note = thymine
  modified_base 272: mod_base = OTHER; note = thymine
  modified_base 275: mod_base = OTHER; note = thymine
  modified_base 289..290: mod_base = OTHER; note = thymine
  modified_base 305: mod_base = OTHER; note = thymine
  modified_base 308: mod_base = OTHER; note = thymine
  modified_base 313: mod_base = OTHER; note = thymine
  modified_base 317: mod_base = OTHER; note = thymine
  modified_base 331: mod_base = OTHER; note = thymine
  modified_base 338: mod_base = OTHER; note = thymine
  modified_base 353: mod_base = OTHER; note = thymine
  modified_base 365: mod_base = OTHER; note = thymine
  modified_base 374: mod_base = OTHER; note = thymine
  modified_base 379: mod_base = OTHER; note = thymine
  modified_base 382: mod_base = OTHER; note = thymine
  modified_base 389: mod_base = OTHER; note = thymine
  modified_base 392: mod_base = OTHER; note = thymine
  modified_base 395: mod_base = OTHER; note = thymine
  modified_base 401: mod_base = OTHER; note = thymine
  modified_base 404: mod_base = OTHER; note = thymine
  modified_base 418: mod_base = OTHER; note = thymine
  modified_base 422: mod_base = OTHER; note = thymine
  modified_base 424: mod_base = OTHER; note = thymine
  modified_base 464: mod_base = OTHER; note = thymine
  modified_base 473: mod_base = OTHER; note = thymine
  modified_base 476: mod_base = OTHER; note = thymine
  modified_base 485: mod_base = OTHER; note = thymine
  modified_base 506: mod_base = OTHER; note = thymine
  modified_base 520..521: mod_base = OTHER; note = thymine
  modified_base 539: mod_base = OTHER; note = thymine
  modified_base 545: mod_base = OTHER; note = thymine
  modified_base 553..554: mod_base = OTHER; note = thymine
  modified_base 565: mod_base = OTHER; note = thymine
  modified_base 575: mod_base = OTHER; note = thymine
  modified_base 589: mod_base = OTHER; note = thymine
  modified_base 595: mod_base = OTHER; note = thymine
  modified_base 598: mod_base = OTHER; note = thymine
  modified_base 607..608: mod_base = OTHER; note = thymine
  modified_base 610: mod_base = OTHER; note = thymine
  modified_base 623: mod_base = OTHER; note = thymine
  modified_base 635: mod_base = OTHER; note = thymine
  modified_base 638: mod_base = OTHER; note = thymine
  modified_base 641: mod_base = OTHER; note = thymine
  modified_base 644: mod_base = OTHER; note = thymine
  modified_base 646..647: mod_base = OTHER; note = thymine
  modified_base 664..665: mod_base = OTHER; note = thymine
  modified_base 680: mod_base = OTHER; note = thymine
  modified_base 682: mod_base = OTHER; note = thymine
  modified_base 692: mod_base = OTHER; note = thymine
  modified_base 704: mod_base = OTHER; note = thymine
  modified_base 713: mod_base = OTHER; note = thymine
  modified_base 716: mod_base = OTHER; note = thymine
  modified_base 719: mod_base = OTHER; note = thymine
  modified_base 737: mod_base = OTHER; note = thymine
  modified_base 739: mod_base = OTHER; note = thymine
  modified_base 752: mod_base = OTHER; note = thymine
  modified_base 761: mod_base = OTHER; note = thymine
  modified_base 764: mod_base = OTHER; note = thymine
  modified_base 772: mod_base = OTHER; note = thymine
  modified_base 778..779: mod_base = OTHER; note = thymine
  modified_base 814: mod_base = OTHER; note = thymine
  modified_base 829..830: mod_base = OTHER; note = thymine
  modified_base 833: mod_base = OTHER; note = thymine
  modified_base 835: mod_base = OTHER; note = thymine
  modified_base 839: mod_base = OTHER; note = thymine
  modified_base 848: mod_base = OTHER; note = thymine
  modified_base 857: mod_base = OTHER; note = thymine
  modified_base 863: mod_base = OTHER; note = thymine
  modified_base 866: mod_base = OTHER; note = thymine
  modified_base 877: mod_base = OTHER; note = thymine
  modified_base 890: mod_base = OTHER; note = thymine
  modified_base 914: mod_base = OTHER; note = thymine
  modified_base 917: mod_base = OTHER; note = thymine
  modified_base 928: mod_base = OTHER; note = thymine
  modified_base 937: mod_base = OTHER; note = thymine
  modified_base 944: mod_base = OTHER; note = thymine
  modified_base 949: mod_base = OTHER; note = thymine
  modified_base 968: mod_base = OTHER; note = thymine
  modified_base 971: mod_base = OTHER; note = thymine
  modified_base 977: mod_base = OTHER; note = thymine
  modified_base 991..992: mod_base = OTHER; note = thymine
  modified_base 994..995: mod_base = OTHER; note = thymine
  modified_base 1004: mod_base = OTHER; note = thymine
  modified_base 1009: mod_base = OTHER; note = thymine
  modified_base 1033: mod_base = OTHER; note = thymine
  modified_base 1040: mod_base = OTHER; note = thymine
  modified_base 1043: mod_base = OTHER; note = thymine
  modified_base 1049: mod_base = OTHER; note = thymine
  modified_base 1057: mod_base = OTHER; note = thymine
  modified_base 1067: mod_base = OTHER; note = thymine
  modified_base 1069: mod_base = OTHER; note = thymine
  modified_base 1079: mod_base = OTHER; note = thymine
  modified_base 1094: mod_base = OTHER; note = thymine
  modified_base 1108: mod_base = OTHER; note = thymine
  modified_base 1115: mod_base = OTHER; note = thymine
  modified_base 1121: mod_base = OTHER; note = thymine
  modified_base 1123: mod_base = OTHER; note = thymine
  modified_base 1133: mod_base = OTHER; note = thymine
  modified_base 1145: mod_base = OTHER; note = thymine
  modified_base 1156..1157: mod_base = OTHER; note = thymine
  modified_base 1159: mod_base = OTHER; note = thymine
  modified_base 1163: mod_base = OTHER; note = thymine
  modified_base 1165..1166: mod_base = OTHER; note = thymine
  modified_base 1184: mod_base = OTHER; note = thymine
  modified_base 1196: mod_base = OTHER; note = thymine
  modified_base 1208: mod_base = OTHER; note = thymine
  modified_base 1220: mod_base = OTHER; note = thymine
  modified_base 1223: mod_base = OTHER; note = thymine
  modified_base 1232: mod_base = OTHER; note = thymine
  modified_base 1235: mod_base = OTHER; note = thymine
  modified_base 1244: mod_base = OTHER; note = thymine
  modified_base 1246: mod_base = OTHER; note = thymine
  modified_base 1249..1250: mod_base = OTHER; note = thymine
  modified_base 1258..1259: mod_base = OTHER; note = thymine
  modified_base 1262: mod_base = OTHER; note = thymine
  modified_base 1268: mod_base = OTHER; note = thymine
  modified_base 1270: mod_base = OTHER; note = thymine
  modified_base 1274: mod_base = OTHER; note = thymine
  modified_base 1283: mod_base = OTHER; note = thymine
  modified_base 1292: mod_base = OTHER; note = thymine
  modified_base 1295: mod_base = OTHER; note = thymine
  modified_base 1301: mod_base = OTHER; note = thymine
  modified_base 1304: mod_base = OTHER; note = thymine
  modified_base 1321: mod_base = OTHER; note = thymine
  modified_base 1333: mod_base = OTHER; note = thymine
  modified_base 1343: mod_base = OTHER; note = thymine
  modified_base 1345: mod_base = OTHER; note = thymine
  modified_base 1357: mod_base = OTHER; note = thymine
  modified_base 1385: mod_base = OTHER; note = thymine
  modified_base 1387: mod_base = OTHER; note = thymine
  modified_base 1391: mod_base = OTHER; note = thymine
  modified_base 1400: mod_base = OTHER; note = thymine
  modified_base 1415: mod_base = OTHER; note = thymine
  modified_base 1427: mod_base = OTHER; note = thymine
  modified_base 1430: mod_base = OTHER; note = thymine
  modified_base 1433: mod_base = OTHER; note = thymine
  modified_base 1442: mod_base = OTHER; note = thymine
  modified_base 1444: mod_base = OTHER; note = thymine
  modified_base 1460: mod_base = OTHER; note = thymine
  modified_base 1463: mod_base = OTHER; note = thymine
  modified_base 1472: mod_base = OTHER; note = thymine
  modified_base 1475: mod_base = OTHER; note = thymine
  modified_base 1483: mod_base = OTHER; note = thymine
  modified_base 1489: mod_base = OTHER; note = thymine
  modified_base 1502: mod_base = OTHER; note = thymine
  modified_base 1508: mod_base = OTHER; note = thymine
  modified_base 1526: mod_base = OTHER; note = thymine
  modified_base 1534: mod_base = OTHER; note = thymine
  modified_base 1537..1538: mod_base = OTHER; note = thymine
  modified_base 1556: mod_base = OTHER; note = thymine
  modified_base 1609..1610: mod_base = OTHER; note = thymine
  modified_base 1618: mod_base = OTHER; note = thymine
  modified_base 1621..1622: mod_base = OTHER; note = thymine
  modified_base 1630..1631: mod_base = OTHER; note = thymine
  modified_base 1634: mod_base = OTHER; note = thymine
  modified_base 1648: mod_base = OTHER; note = thymine
  modified_base 1658: mod_base = OTHER; note = thymine
  modified_base 1661: mod_base = OTHER; note = thymine
  modified_base 1667: mod_base = OTHER; note = thymine
  modified_base 1673: mod_base = OTHER; note = thymine
  modified_base 1675: mod_base = OTHER; note = thymine
  modified_base 1696: mod_base = OTHER; note = thymine
  modified_base 1700: mod_base = OTHER; note = thymine
  modified_base 1702: mod_base = OTHER; note = thymine
  modified_base 1705: mod_base = OTHER; note = thymine
  modified_base 1718: mod_base = OTHER; note = thymine
  modified_base 1724: mod_base = OTHER; note = thymine
  modified_base 1733: mod_base = OTHER; note = thymine
  modified_base 1747: mod_base = OTHER; note = thymine
  modified_base 1751: mod_base = OTHER; note = thymine
  modified_base 1757: mod_base = OTHER; note = thymine
  modified_base 1769: mod_base = OTHER; note = thymine
  modified_base 1774..1775: mod_base = OTHER; note = thymine
  modified_base 1777: mod_base = OTHER; note = thymine
  modified_base 1786: mod_base = OTHER; note = thymine
  modified_base 1795: mod_base = OTHER; note = thymine
  modified_base 1798..1799: mod_base = OTHER; note = thymine
  modified_base 1811: mod_base = OTHER; note = thymine
  modified_base 1814: mod_base = OTHER; note = thymine
  modified_base 1817: mod_base = OTHER; note = thymine
  modified_base 1820: mod_base = OTHER; note = thymine
  modified_base 1825: mod_base = OTHER; note = thymine
  modified_base 1858: mod_base = OTHER; note = thymine
  modified_base 1864: mod_base = OTHER; note = thymine
  modified_base 1867..1868: mod_base = OTHER; note = thymine
  modified_base 1885: mod_base = OTHER; note = thymine
  modified_base 1894: mod_base = OTHER; note = thymine
  modified_base 1903..1904: mod_base = OTHER; note = thymine
  modified_base 1916: mod_base = OTHER; note = thymine
  modified_base 1924: mod_base = OTHER; note = thymine
  modified_base 1930..1931: mod_base = OTHER; note = thymine
  modified_base 1939: mod_base = OTHER; note = thymine
  modified_base 1955: mod_base = OTHER; note = thymine
  modified_base 1958: mod_base = OTHER; note = thymine
  modified_base 1961: mod_base = OTHER; note = thymine
  modified_base 1969..1970: mod_base = OTHER; note = thymine
  modified_base 1984..1985: mod_base = OTHER; note = thymine
  modified_base 2000: mod_base = OTHER; note = thymine
  modified_base 2014: mod_base = OTHER; note = thymine
  modified_base 2018: mod_base = OTHER; note = thymine
  modified_base 2026..2027: mod_base = OTHER; note = thymine
  modified_base 2030: mod_base = OTHER; note = thymine
  modified_base 2032: mod_base = OTHER; note = thymine
  modified_base 2038..2039: mod_base = OTHER; note = thymine
  modified_base 2042: mod_base = OTHER; note = thymine
  modified_base 2054: mod_base = OTHER; note = thymine
  modified_base 2060: mod_base = OTHER; note = thymine
  modified_base 2084: mod_base = OTHER; note = thymine
  modified_base 2086..2087: mod_base = OTHER; note = thymine
  modified_base 2092: mod_base = OTHER; note = thymine
  modified_base 2105: mod_base = OTHER; note = thymine
  modified_base 2114: mod_base = OTHER; note = thymine
  modified_base 2117: mod_base = OTHER; note = thymine
  modified_base 2125..2126: mod_base = OTHER; note = thymine
  modified_base 2128: mod_base = OTHER; note = thymine
  modified_base 2135: mod_base = OTHER; note = thymine
  modified_base 2144: mod_base = OTHER; note = thymine
  modified_base 2174: mod_base = OTHER; note = thymine
  modified_base 2183: mod_base = OTHER; note = thymine
  modified_base 2186: mod_base = OTHER; note = thymine
  modified_base 2189: mod_base = OTHER; note = thymine
  modified_base 2194: mod_base = OTHER; note = thymine
  modified_base 2197: mod_base = OTHER; note = thymine
  modified_base 2204: mod_base = OTHER; note = thymine
  modified_base 2210: mod_base = OTHER; note = thymine
  modified_base 2222: mod_base = OTHER; note = thymine
  modified_base 2230..2231: mod_base = OTHER; note = thymine
  modified_base 2234: mod_base = OTHER; note = thymine
  modified_base 2239: mod_base = OTHER; note = thymine
  modified_base 2249: mod_base = OTHER; note = thymine
  modified_base 2257..2258: mod_base = OTHER; note = thymine
  modified_base 2273: mod_base = OTHER; note = thymine
  modified_base 2294: mod_base = OTHER; note = thymine
  modified_base 2297: mod_base = OTHER; note = thymine
  modified_base 2314..2315: mod_base = OTHER; note = thymine
  modified_base 2326: mod_base = OTHER; note = thymine
  modified_base 2332..2333: mod_base = OTHER; note = thymine
  modified_base 2335..2336: mod_base = OTHER; note = thymine
  modified_base 2348: mod_base = OTHER; note = thymine
  modified_base 2351: mod_base = OTHER; note = thymine
  modified_base 2354: mod_base = OTHER; note = thymine
  modified_base 2360: mod_base = OTHER; note = thymine
  modified_base 2362..2363: mod_base = OTHER; note = thymine
  modified_base 2389..2390: mod_base = OTHER; note = thymine
  modified_base 2408: mod_base = OTHER; note = thymine
  modified_base 2417: mod_base = OTHER; note = thymine
  modified_base 2426: mod_base = OTHER; note = thymine
  modified_base 2429: mod_base = OTHER; note = thymine
  modified_base 2441: mod_base = OTHER; note = thymine
  modified_base 2443: mod_base = OTHER; note = thymine
  modified_base 2446: mod_base = OTHER; note = thymine
  modified_base 2462: mod_base = OTHER; note = thymine
  modified_base 2470: mod_base = OTHER; note = thymine
  modified_base 2474: mod_base = OTHER; note = thymine
  modified_base 2483: mod_base = OTHER; note = thymine
  modified_base 2485..2486: mod_base = OTHER; note = thymine
  modified_base 2489: mod_base = OTHER; note = thymine
  modified_base 2491: mod_base = OTHER; note = thymine
  modified_base 2513: mod_base = OTHER; note = thymine
  modified_base 2515: mod_base = OTHER; note = thymine
  modified_base 2531: mod_base = OTHER; note = thymine
  modified_base 2540: mod_base = OTHER; note = thymine
  modified_base 2545: mod_base = OTHER; note = thymine
  modified_base 2558: mod_base = OTHER; note = thymine
  modified_base 2570: mod_base = OTHER; note = thymine
  modified_base 2572: mod_base = OTHER; note = thymine
  modified_base 2576: mod_base = OTHER; note = thymine
  modified_base 2579: mod_base = OTHER; note = thymine
  modified_base 2585: mod_base = OTHER; note = thymine
  modified_base 2591: mod_base = OTHER; note = thymine
  modified_base 2600: mod_base = OTHER; note = thymine
  modified_base 2606: mod_base = OTHER; note = thymine
  modified_base 2615: mod_base = OTHER; note = thymine
  modified_base 2624: mod_base = OTHER; note = thymine
  modified_base 2627: mod_base = OTHER; note = thymine
  modified_base 2651: mod_base = OTHER; note = thymine
  modified_base 2653: mod_base = OTHER; note = thymine
  modified_base 2663: mod_base = OTHER; note = thymine
  modified_base 2675: mod_base = OTHER; note = thymine
  modified_base 2707..2708: mod_base = OTHER; note = thymine
  modified_base 2719..2720: mod_base = OTHER; note = thymine
  modified_base 2722: mod_base = OTHER; note = thymine
  modified_base 2728: mod_base = OTHER; note = thymine
  modified_base 2759: mod_base = OTHER; note = thymine
  modified_base 2768: mod_base = OTHER; note = thymine
  modified_base 2774: mod_base = OTHER; note = thymine
  modified_base 2783: mod_base = OTHER; note = thymine
  modified_base 2798: mod_base = OTHER; note = thymine
  modified_base 2800: mod_base = OTHER; note = thymine
  modified_base 2804: mod_base = OTHER; note = thymine
  modified_base 2822: mod_base = OTHER; note = thymine
  modified_base 2840: mod_base = OTHER; note = thymine
  modified_base 2843: mod_base = OTHER; note = thymine
  modified_base 2849: mod_base = OTHER; note = thymine
  modified_base 2855: mod_base = OTHER; note = thymine
  modified_base 2857..2858: mod_base = OTHER; note = thymine
  modified_base 2875: mod_base = OTHER; note = thymine
  modified_base 2878: mod_base = OTHER; note = thymine
  modified_base 2882: mod_base = OTHER; note = thymine
  modified_base 2885: mod_base = OTHER; note = thymine
  modified_base 2891: mod_base = OTHER; note = thymine
  modified_base 2893: mod_base = OTHER; note = thymine
  modified_base 2896: mod_base = OTHER; note = thymine
  modified_base 2899: mod_base = OTHER; note = thymine
  modified_base 2906: mod_base = OTHER; note = thymine
  modified_base 2918: mod_base = OTHER; note = thymine
  modified_base 2921: mod_base = OTHER; note = thymine
  modified_base 2936: mod_base = OTHER; note = thymine
  modified_base 2939: mod_base = OTHER; note = thymine
  modified_base 2962: mod_base = OTHER; note = thymine
  modified_base 2969: mod_base = OTHER; note = thymine
  modified_base 2972: mod_base = OTHER; note = thymine
  modified_base 2980: mod_base = OTHER; note = thymine
  modified_base 2983..2984: mod_base = OTHER; note = thymine
  modified_base 2989..2990: mod_base = OTHER; note = thymine
  modified_base 2995..2996: mod_base = OTHER; note = thymine
  modified_base 2998: mod_base = OTHER; note = thymine
  modified_base 3002: mod_base = OTHER; note = thymine
  modified_base 3017: mod_base = OTHER; note = thymine
  modified_base 3020: mod_base = OTHER; note = thymine
  modified_base 3026: mod_base = OTHER; note = thymine
  modified_base 3029: mod_base = OTHER; note = thymine
  modified_base 3047: mod_base = OTHER; note = thymine
  modified_base 3049..3050: mod_base = OTHER; note = thymine
  modified_base 3055: mod_base = OTHER; note = thymine
  modified_base 3058..3059: mod_base = OTHER; note = thymine
  modified_base 3064: mod_base = OTHER; note = thymine
  modified_base 3067: mod_base = OTHER; note = thymine
  modified_base 3089: mod_base = OTHER; note = thymine
  modified_base 3095: mod_base = OTHER; note = thymine
  modified_base 3101: mod_base = OTHER; note = thymine
  modified_base 3110: mod_base = OTHER; note = thymine
  modified_base 3122: mod_base = OTHER; note = thymine
  modified_base 3137: mod_base = OTHER; note = thymine
  modified_base 3140: mod_base = OTHER; note = thymine
  modified_base 3149: mod_base = OTHER; note = thymine
  modified_base 3155: mod_base = OTHER; note = thymine
  modified_base 3167: mod_base = OTHER; note = thymine
  modified_base 3169: mod_base = OTHER; note = thymine
  modified_base 3172..3173: mod_base = OTHER; note = thymine
  modified_base 3181: mod_base = OTHER; note = thymine
  modified_base 3188: mod_base = OTHER; note = thymine
  modified_base 3197: mod_base = OTHER; note = thymine
  modified_base 3209: mod_base = OTHER; note = thymine
  modified_base 3217: mod_base = OTHER; note = thymine
  modified_base 3224: mod_base = OTHER; note = thymine
  modified_base 3242: mod_base = OTHER; note = thymine
  misc_feature 1..3249: note = Synthetic
  source 1..3249: mol_type = other RNA
atggcagcattcaaaccaaactcaatcaactacatcctaggactagcaatcggaatcgcatcagtaggatgagcaatggtagaaatcgacgaagaagaaaacccaatccgactaatcgacctaggagtacgagtattcgaacgagcagaagtaccaaaaacaggagactcactagcaatggcacgacgactagcacgatcagtacgacgactaacacgacgacgagcacaccgactactacgaacacgacgactactaaaacgagaaggagtactacaagcagcaaacttcgacgaaaacggactaatcaaatcactaccaaacacaccatgacaactacgagcagcagcactagaccgaaaactaacaccactagaatgatcagcagtactactacacctaatcaaacaccgaggatacctatcacaacgaaaaaacgaaggagaaacagcagacaaagaactaggagcactactaaaaggagtagcaggaaacgcacacgcactacaaacaggagacttccgaacaccagcagaactagcactaaacaaattcgaaaaagaatcaggacacatccgaaaccaacgatcagactactcacacacattctcacgaaaagacctacaagcagaactaatcctactattcgaaaaacaaaaagaattcggaaacccacacgtatcaggaggactaaaagaaggaatcgaaacactactaatgacacaacgaccagcactatcaggagacgcagtacaaaaaatgctaggacactgcacattcgaaccagcagaaccaaaagcagcaaaaaacacatacacagcagaacgattcatctgactaacaaaactaaacaacctacgaatcctagaacaaggatcagaacgaccactaacagacacagaacgagcaacactaatggacgaaccataccgaaaatcaaaactaacatacgcacaagcacgaaaactactaggactagaagacacagcattcttcaaaggactacgatacggaaaagacaacgcagaagcatcaacactaatggaaatgaaagcataccacgcaatctcacgagcactagaaaaagaaggactaaaagacaaaaaatcaccactaaacctatcaccagaactacaagacgaaatcggaacagcattctcactattcaaaacagacgaagacatcacaggacgactaaaagaccgaatccaaccagaaatcctagaagcactactaaaacacatctcattcgacaaattcgtacaaatctcactaaaagcactacgacgaatcgtaccactaatggaacaaggaaaacgatacgacgaagcatgcgcagaaatctacggagaccactacggaaaaaaaaacacagaagaaaaaatctacctaccaccaatcccagcagacgaaatccgaaacccagtagtactacgagcactatcacaagcacgaaaagtaatcaacggagtagtacgacgatacggatcaccagcacgaatccacatcgaaacagcacgagaagtaggaaaatcattcaaagaccgaaaagaaatcgaaaaacgacaagaagaaaaccgaaaagaccgagaaaaagcagcagcaaaattccgagaatacttcccaaacttcgtaggagaaccaaaatcaaaagacatcctaaaactacgactatacgaacaacaacacggaaaatgcctatactcaggaaaagaaatcaacctaggacgactaaacgaaaaaggatacgtagaaatcgacgcagcactaccattctcacgaacatgagacgactcattcaacaacaaagtactagtactaggatcagaaaaccaaaacaaaggaaaccaaacaccatacgaatacttcaacggaaaagacaactcacgagaatgacaagaattcaaagcacgagtagaaacatcacgattcccacgatcaaaaaaacaacgaatcctactacaaaaattcgacgaagacggattcaaagaacgaaacctaaacgacacacgatacgtaaaccgattcctatgccaattcgtagcagaccgaatgcgactaacaggaaaaggaaaaaaacgagtattcgcatcaaacggacaaatcacaaacctactacgaggattctgaggactacgaaaagtacgagcagaaaacgaccgacaccacgcactagacgcagtagtagtagcatgctcaacagtagcaatgcaacaaaaaatcacacgattcgtacgatacaaagaaatgaacgcattcgacggaaaaacaatcgacaaagaaacaggagaagtactacaccaaaaaacacacttcccacaaccatgagaattcttcgcacaagaagtaatgatccgagtattcggaaaaccagacggaaaaccagaattcgaagaagcagacacactagaaaaactacgaacactactagcagaaaaactatcatcacgaccagaagcagtacacgaatacgtaacaccactattcgtatcacgagcaccaaaccgaaaaatgtcaggacaaggacacatggaaacagtaaaatcagcaaaacgactagacgaaggagtatcagtactacgagtaccactaacacaactaaaactaaaagacctagaaaaaatggtaaaccgagaacgagaaccaaaactatacgaagcactaaaagcacgactagaagcacacaaagacgacccagcaaaagcattcgcagaaccattctacaaatacgacaaagcaggaaaccgaacacaacaagtaaaagcagtacgagtagaacaagtacaaaaaacaggagtatgagtacgaaaccacaacggaatcgcagacaacgcaacaatggtacgagtagacgtattcgaaaaaggagacaaatactacctagtaccaatctactcatgacaagtagcaaaaggaatcctaccagaccgagcagtagtacaaggaaaagacgaagaagactgacaactaatcgacgactcattcaacttcaaattctcactacacccaaacgacctagtagaagtaatcacaaaaaaagcacgaatgttcggatacttcgcatcatgccaccgaggaacaggaaacatcaacatccgaatccacgacctagaccacaaaatcggaaaaaacggaatcctagaaggaatcggagtaaaaacagcactatcattccaaaaataccaaatcgacgaactaggaaaagaaatccgaccatgccgactaaaaaaacgaccaccagtacgataa

SEQ ID NO: 234 - protein, 1082 aa, synthetic construct
  REGION 1..1082: note = Synthetic
MAAFKPNSINYILGLAIGIASVGWAMVEIDEEENPIRLIDLGVRVFERAEVPKTGDSLAMARRLARSVRRLTRRRAHRLLRTRRLLKREGVLQAANFDENGLIKSLPNTPWQLRAAALDRKLTPLEWSAVLLHLIKHRGYLSQRKNEGETADKELGALLKGVAGNAHALQTGDFRTPAELALNKFEKESGHIRNQRSDYSHTFSRKDLQAELILLFEKQKEFGNPHVSGGLKEGIETLLMTQRPALSGDAVQKMLGHCTFEPAEPKAAKNTYTAERFIWLTKLNNLRILEQGSERPLTDTERATLMDEPYRKSKLTYAQARKLLGLEDTAFFKGLRYGKDNAEASTLMEMKAYHAISRALEKEGLKDKKSPLNLSPELQDEIGTAFSLFKTDEDITGRLKDRIQPEILEALLKHISFDKFVQISLKALRRIVPLMEQGKRYDEACAEIYGDHYGKKNTEEKIYLPPIPADEIRNPVVLRALSQARKVINGVVRRYGSPARIHIETAREVGKSFKDRKEIEKRQEENRKDREKAAAKFREYFPNFVGEPKSKDILKLRLYEQQHGKCLYSGKEINLGRLNEKGYVEIDHALPFSRTWDDSFNNKVLVLGSENQNKGNQTPYEYFNGKDNSREWQEFKARVETSRFPRSKKQRILLQKFDEDGFKERNLNDTRYVNRFLCQFVADRMRLTGKGKKRVFASNGQITNLLRGFWGLRKVRAENDRHHALDAVVVACSTVAMQQKITRFVRYKEMNAFDGKTIDKETGEVLHQKTHFPQPWEFFAQEVMIRVFGKPDGKPEFEEADTLEKLRTLLAEKLSSRPEAVHEYVTPLFVSRAPNRKMSGQGHMETVKSAKRLDEGVSVLRVPLTQLKLKDLEKMVNREREPKLYEALKARLEAHKDDPAKAFAEPFYKYDKAGNRTQQVKAVRVEQVQKTGVWVRNHNGIADNATMVRVDVFEKGDKYYLVPIYSWQVAKGILPDRAVVQGKDEEDWQLIDDSFNFKFSLHPNDLVEVITKKARMFGYFASCHRGTGNINIRIHDLDHKIGKNGILEGIGVKTALSFQKYQIDELGKEIRPCRLKKRPPVR

SEQ ID NO: 235 - DNA, 3243 bp, synthetic construct
  misc_feature 1..3243: note = Synthetic
  source 1..3243: mol_type = other DNA
gctgcttttaagcctaattctattaattatattcttggtcttgctattggtattgcttctgttggttgggctatggttgagattgatgaggaggagaatcctattcgtcttattgatcttggtgttcgtgtttttgagcgtgctgaggttcctaagactggtgattctcttgctatggctcgtcgtcttgctcgttctgttcgtcgtcttactcgtcgtcgtgctcatcgtcttcttcgtactcgtcgtcttcttaagcgtgagggtgttcttcaggctgctaattttgatgagaatggtcttattaagtctcttcctaatactccttggcagcttcgtgctgctgctcttgatcgtaagcttactcctcttgagtggtctgctgttcttcttcatcttattaagcatcgtggttatctttctcagcgtaagaatgagggtgagactgctgataaggagcttggtgctcttcttaagggtgttgctggtaatgctcatgctcttcagactggtgattttcgtactcctgctgagcttgctcttaataagtttgagaaggagtctggtcatattcgtaatcagcgttctgattattctcatactttttctcgtaaggatcttcaggctgagcttattcttctttttgagaagcagaaggagtttggtaatcctcatgtttctggtggtcttaaggagggtattgagactcttcttatgactcagcgtcctgctctttctggtgatgctgttcagaagatgcttggtcattgtacttttgagcctgctgagcctaaggctgctaagaatacttatactgctgagcgttttatttggcttactaagcttaataatcttcgtattcttgagcagggttctgagcgtcctcttactgatactgagcgtgctactcttatggatgagccttatcgtaagtctaagcttacttatgctcaggctcgtaagcttcttggtcttgaggatactgctttttttaagggtcttcgttatggtaaggataatgctgaggcttctactcttatggagatgaaggcttatcatgctatttctcgtgctcttgagaaggagggtcttaaggataagaagtctcctcttaatctttctcctgagcttcaggatgagattggtactgctttttctctttttaagactgatgaggatattactggtcgtcttaaggatcgtattcagcctgagattcttgaggctcttcttaagcatatttcttttgataagtttgttcagatttctcttaaggctcttcgtcgtattgttcctcttatggagcagggtaagcgttatgatgaggcttgtgctgagatttatggtgatcattatggtaagaagaatactgaggagaagatttatcttcctcctattcctgctgatgagattcgtaatcctgttgttcttcgtgctctttctcaggctcgtaaggttattaatggtgttgttcgtcgttatggttctcctgctcgtattcatattgagactgctcgtgaggttggtaagtcttttaaggatcgtaaggagattgagaagcgtcaggaggagaatcgtaaggatcgtgagaaggctgctgctaagtttcgtgagtattttcctaattttgttggtgagcctaagtctaaggatattcttaagcttcgtctttatgagcagcagcatggtaagtgtctttattctggtaaggagattaatcttggtcgtcttaatgagaagggttatgttgagattgatcatgctcttcctttttctcgtacttgggatgattcttttaataataaggttcttgttcttggttctgagaatcagaataagggtaatcagactccttatgagtattttaatggtaaggataattctcgtgagtggcaggagtttaaggctcgtgttgagacttctcgttttcctcgttctaagaagcagcgtattcttcttcagaagtttgatgaggatggttttaaggagcgtaatcttaatgatactcgttatgttaatcgttttctttgtcagtttgttgctgatcgtatgcgtcttactggtaagggtaagaagcgtgtttttgcttctaatggtcagattactaatcttcttcgtggtttttggggtcttcgtaaggttcgtgctgagaatgatcgtcatcatgctcttgatgctgttgttgttgcttgttctactgttgctatgcagcagaagattactcgttttgttcgttataaggagatgaatgcttttgatggtaagactattgataaggagactggtgaggttcttcatcagaagactcattttcctcagccttgggagttttttgctcaggaggttatgattcgtgtttttggtaagcctgatggtaagcctgagtttgaggaggctgatactcttgagaagcttcgtactcttcttgctgagaagctttcttctcgtcctgaggctgttcatgagtatgttactcctctttttgtttctcgtgctcctaatcgtaagatgtctggtcagggtcatatggagactgttaagtctgctaagcgtcttgatgagggtgtttctgttcttcgtgttcctcttactcagcttaagcttaaggatcttgagaagatggttaatcgtgagcgtgagcctaagctttatgaggctcttaaggctcgtcttgaggctcataaggatgatcctgctaaggcttttgctgagcctttttataagtatgataaggctggtaatcgtactcagcaggttaaggctgttcgtgttgagcaggttcagaagactggtgtttgggttcgtaatcataatggtattgctgataatgctactatggttcgtgttgatgtttttgagaagggtgataagtattatcttgttcctatttattcttggcaggttgctaagggtattcttcctgatcgtgctgttgttcagggtaaggatgaggaggattggcagcttattgatgattcttttaattttaagttttctcttcatcctaatgatcttgttgaggttattactaagaaggctcgtatgtttggttattttgcttcttgtcatcgtggtactggtaatattaatattcgtattcatgatcttgatcataagattggtaagaatggtattcttgagggtattggtgttaagactgctctttcttttcagaagtatcagattgatgagcttggtaaggagattcgtccttgtcgtcttaagaagcgtcctcctgttcgt

SEQ ID NO: 236 - DNA, 3243 bp, synthetic construct
  misc_feature 1..3243: note = Synthetic
  source 1..3243: mol_type = other DNA
gccgccttcaagcccaactccatcaactacatcctgggcctggccatcggcatcgcctccgtgggctgggccatggtggagatcgacgaggaggagaaccccatccggctgatcgacctgggcgtgcgggtgttcgagcgggccgaggtgcccaagaccggcgactccctggccatggcccggcggctggcccggtccgtgcggcggctgacccggcggcgggcccaccggctgctgcggacccggcggctgctgaagcgggagggcgtgctgcaggccgccaacttcgacgagaacggcctgatcaagtccctgcccaacaccccctggcagctgcgggccgccgccctggaccggaagctgacccccctggagtggtccgccgtgctgctgcacctgatcaagcaccggggctacctgtcccagcggaagaacgagggcgagaccgccgacaaggagctgggcgccctgctgaagggcgtggccggcaacgcccacgccctgcagaccggcgacttccggacccccgccgagctggccctgaacaagttcgagaaggagtccggccacatccggaaccagcggtccgactactcccacaccttctcccggaaggacctgcaggccgagctgatcctgctgttcgagaagcagaaggagttcggcaacccccacgtgtccggcggcctgaaggagggcatcgagaccctgctgatgacccagcggcccgccctgtccggcgacgccgtgcagaagatgctgggccactgcaccttcgagcccgccgagcccaaggccgccaagaacacctacaccgccgagcggttcatctggctgaccaagctgaacaacctgcggatcctggagcagggctccgagcggcccctgaccgacaccgagcgggccaccctgatggacgagccctaccggaagtccaagctgacctacgcccaggcccggaagctgctgggcctggaggacaccgccttcttcaagggcctgcggtacggcaaggacaacgccgaggcctccaccctgatggagatgaaggcctaccacgccatctcccgggccctggagaaggagggcctgaaggacaagaagtcccccctgaacctgtcccccgagctgcaggacgagatcggcaccgccttctccctgttcaagaccgacgaggacatcaccggccggctgaaggaccggatccagcccgagatcctggaggccctgctgaagcacatctccttcgacaagttcgtgcagatctccctgaaggccctgcggcggatcgtgcccctgatggagcagggcaagcggtacgacgaggcctgcgccgagatctacggcgaccactacggcaagaagaacaccgaggagaagatctacctgccccccatccccgccgacgagatccggaaccccgtggtgctgcgggccctgtcccaggcccggaaggtgatcaacggcgtggtgcggcggtacggctcccccgcccggatccacatcgagaccgcccgggaggtgggcaagtccttcaaggaccggaaggagatcgagaagcggcaggaggagaaccggaaggaccgggagaaggccgccgccaagttccgggagtacttccccaacttcgtgggcgagcccaagtccaaggacatcctgaagctgcggctgtacgagcagcagcacggcaagtgcctgtactccggcaaggagatcaacctgggccggctgaacgagaagggctacgtggagatcgaccacgccctgcccttctcccggacctgggacgactccttcaacaacaaggtgctggtgctgggctccgagaaccagaacaagggcaaccagaccccctacgagtacttcaacggcaaggacaactcccgggagtggcaggagttcaaggcccgggtggagacctcccggttcccccggtccaagaagcagcggatcctgctgcagaagttcgacgaggacggcttcaaggagcggaacctgaacgacacccggtacgtgaaccggttcctgtgccagttcgtggccgaccggatgcggctgaccggcaagggcaagaagcgggtgttcgcctccaacggccagatcaccaacctgctgcggggcttctggggcctgcggaaggtgcgggccgagaacgaccggcaccacgccctggacgccgtggtggtggcctgctccaccgtggccatgcagcagaagatcacccggttcgtgcggtacaaggagatgaacgccttcgacggcaagaccatcgacaaggagaccggcgaggtgctgcaccagaagacccacttcccccagccctgggagttcttcgcccaggaggtgatgatccgggtgttcggcaagcccgacggcaagcccgagttcgaggaggccgacaccctggagaagctgcggaccctgctggccgagaagctgtcctcccggcccgaggccgtgcacgagtacgtgacccccctgttcgtgtcccgggcccccaaccggaagatgtccggccagggccacatggagaccgtgaagtccgccaagcggctggacgagggcgtgtccgtgctgcgggtgcccctgacccagctgaagctgaaggacctggagaagatggtgaaccgggagcgggagcccaagctgtacgaggccctgaaggcccggctggaggcccacaaggacgaccccgccaaggccttcgccgagcccttctacaagtacgacaaggccggcaaccggacccagcaggtgaaggccgtgcgggtggagcaggtgcagaagaccggcgtgtgggtgcggaaccacaacggcatcgccgacaacgccaccatggtgcgggtggacgtgttcgagaagggcgacaagtactacctggtgcccatctactcctggcaggtggccaagggcatcctgcccgaccgggccgtggtgcagggcaaggacgaggaggactggcagctgatcgacgactccttcaacttcaagttctccctgcaccccaacgacctggtggaggtgatcaccaagaaggcccggatgttcggctacttcgcctcctgccaccggggcaccggcaacatcaacatccggatccacgacctggaccacaagatcggcaagaacggcatcctggagggcatcggcgtgaagaccgccctgtccttccagaagtaccagatcgacgagctgggcaaggagatccggccctgccggctgaagaagcggccccccgtgcgg

SEQ ID NO: 237 - DNA, 3243 bp, synthetic construct
  misc_feature 1..3243: note = Synthetic
  source 1..3243: mol_type = other DNA
gcagcattcaaaccaaactcaatcaactacatcctaggactagcaatcggaatcgcatcagtaggatgagcaatggtagaaatcgacgaagaagaaaacccaatccgactaatcgacctaggagtacgagtattcgaacgagcagaagtaccaaaaacaggagactcactagcaatggcacgacgactagcacgatcagtacgacgactaacacgacgacgagcacaccgactactacgaacacgacgactactaaaacgagaaggagtactacaagcagcaaacttcgacgaaaacggactaatcaaatcactaccaaacacaccatgacaactacgagcagcagcactagaccgaaaactaacaccactagaatgatcagcagtactactacacctaatcaaacaccgaggatacctatcacaacgaaaaaacgaaggagaaacagcagacaaagaactaggagcactactaaaaggagtagcaggaaacgcacacgcactacaaacaggagacttccgaacaccagcagaactagcactaaacaaattcgaaaaagaatcaggacacatccgaaaccaacgatcagactactcacacacattctcacgaaaagacctacaagcagaactaatcctactattcgaaaaacaaaaagaattcggaaacccacacgtatcaggaggactaaaagaaggaatcgaaacactactaatgacacaacgaccagcactatcaggagacgcagtacaaaaaatgctaggacactgcacattcgaaccagcagaaccaaaagcagcaaaaaacacatacacagcagaacgattcatctgactaacaaaactaaacaacctacgaatcctagaacaaggatcagaacgaccactaacagacacagaacgagcaacactaatggacgaaccataccgaaaatcaaaactaacatacgcacaagcacgaaaactactaggactagaagacacagcattcttcaaaggactacgatacggaaaagacaacgcagaagcatcaacactaatggaaatgaaagcataccacgcaatctcacgagcactagaaaaagaaggactaaaagacaaaaaatcaccactaaacctatcaccagaactacaagacgaaatcggaacagcattctcactattcaaaacagacgaagacatcacaggacgactaaaagaccgaatccaaccagaaatcctagaagcactactaaaacacatctcattcgacaaattcgtacaaatctcactaaaagcactacgacgaatcgtaccactaatggaacaaggaaaacgatacgacgaagcatgcgcagaaatctacggagaccactacggaaaaaaaaacacagaagaaaaaatctacctaccaccaatcccagcagacgaaatccgaaacccagtagtactacgagcactatcacaagcacgaaaagtaatcaacggagtagtacgacgatacggatcaccagcacgaatccacatcgaaacagcacgagaagtaggaaaatcattcaaagaccgaaaagaaatcgaaaaacgacaagaagaaaaccgaaaagaccgagaaaaagcagcagcaaaattccgagaatacttcccaaacttcgtaggagaaccaaaatcaaaagacatcctaaaactacgactatacgaacaacaacacggaaaatgcctatactcaggaaaagaaatcaacctaggacgactaaacgaaaaaggatacgtagaaatcgaccacgcactaccattctcacgaacatgagacgactcattcaacaacaaagtactagtactaggatcagaaaaccaaaacaaaggaaaccaaacaccatacgaatacttcaacggaaaagacaactcacgagaatgacaagaattcaaagcacgagtagaaacatcacgattcccacgatcaaaaaaacaacgaatcctactacaaaaattcgacgaagacggattcaaagaacgaaacctaaacgacacacgatacgtaaaccgattcctatgccaattcgtagcagaccgaatgcgactaacaggaaaaggaaaaaaacgagtattcgcatcaaacggacaaatcacaaacctactacgaggattctgaggactacgaaaagtacgagcagaaaacgaccgacaccacgcactagacgcagtagtagtagcatgctcaacagtagcaatgcaacaaaaaatcacacgattcgtacgatacaaagaaatgaacgcattcgacggaaaaacaatcgacaaagaaacaggagaagtactacaccaaaaaacacacttcccacaaccatgagaattcttcgcacaagaagtaatgatccgagtattcggaaaaccagacggaaaaccagaattcgaagaagcagacacactagaaaaactacgaacactactagcagaaaaactatcatcacgaccagaagcagtacacgaatacgtaacaccactattcgtatcacgagcaccaaaccgaaaaatgtcaggacaaggacacatggaaacagtaaaatcagcaaaacgactagacgaaggagtatcagtactacgagtaccactaacacaactaaaactaaaagacctagaaaaaatggtaaaccgagaacgagaaccaaaactatacgaagcactaaaagcacgactagaagcacacaaagacgacccagcaaaagcattcgcagaaccattctacaaatacgacaaagcaggaaaccgaacacaacaagtaaaagcagtacgagtagaacaagtacaaaaaacaggagtatgagtacgaaaccacaacggaatcgcagacaacgcaacaatggtacgagtagacgtattcgaaaaaggagacaaatactacctagtaccaatctactcatgacaagtagcaaaaggaatcctaccagaccgagcagtagtacaaggaaaagacgaagaagactgacaactaatcgacgactcattcaacttcaaattctcactacacccaaacgacctagtagaagtaatcacaaaaaaagcacgaatgttcggatacttcgcatcatgccaccgaggaacaggaaacatcaacatccgaatccacgacctagaccacaaaatcggaaaaaacggaatcctagaaggaatcggagtaaaaacagcactatcattccaaaaataccaaatcgacgaactaggaaaagaaatccgaccatgccgactaaaaaaacgaccaccagtacga

SEQ ID NO: 238 - RNA, 3249 nt, synthetic construct
  modified_base 2: mod_base = OTHER; note = thymine
  modified_base 6: mod_base = OTHER; note = thymine
  modified_base 9..12: mod_base = OTHER; note = thymine
  modified_base 18: mod_base = OTHER; note = thymine
  modified_base 21..22: mod_base = OTHER; note = thymine
  modified_base 24: mod_base = OTHER; note = thymine
  modified_base 26..27: mod_base = OTHER; note = thymine
  modified_base 30..31: mod_base = OTHER; note = thymine
  modified_base 33: mod_base = OTHER; note = thymine
  modified_base 35..36: mod_base = OTHER; note = thymine
  modified_base 38..39: mod_base = OTHER; note = thymine
  modified_base 42: mod_base = OTHER; note = thymine
  modified_base 44..45: mod_base = OTHER; note = thymine
  modified_base 48: mod_base = OTHER; note = thymine
  modified_base 50..51: mod_base = OTHER; note = thymine
  modified_base 54: mod_base = OTHER; note = thymine
  modified_base 56..57: mod_base = OTHER; note = thymine
  modified_base 60..61: mod_base = OTHER; note = thymine
  modified_base 63: mod_base = OTHER; note = thymine
  modified_base 65..66: mod_base = OTHER; note = thymine
  modified_base 69..70: mod_base = OTHER; note = thymine
  modified_base 75: mod_base = OTHER; note = thymine
  modified_base 77: mod_base = OTHER; note = thymine
  modified_base 80..81: mod_base = OTHER; note = thymine
  modified_base 86..87: mod_base = OTHER; note = thymine
  modified_base 90: mod_base = OTHER; note = thymine
  modified_base 102: mod_base = OTHER; note = thymine
  modified_base 105: mod_base = OTHER; note = thymine
  modified_base 107..108: mod_base = OTHER; note = thymine
  modified_base 111: mod_base = OTHER; note = thymine
  modified_base 113..114: mod_base = OTHER; note = thymine
  modified_base 116..117: mod_base = OTHER; note = thymine
  modified_base 120: mod_base = OTHER; note = thymine
  modified_base 122..123: mod_base = OTHER; note = thymine
  modified_base 126: mod_base = OTHER; note = thymine
  modified_base 128..129: mod_base = OTHER; note = thymine
  modified_base 132: mod_base = OTHER; note = thymine
  modified_base 134..138: mod_base = OTHER; note = thymine
  modified_base 144: mod_base = OTHER; note = thymine
  modified_base 147: mod_base = OTHER; note = thymine
  modified_base 152..153: mod_base = OTHER; note = thymine
  modified_base 156: mod_base = OTHER; note = thymine
  modified_base 162: mod_base = OTHER; note = thymine
  modified_base 165: mod_base = OTHER; note = thymine
  modified_base 168..169: mod_base = OTHER; note = thymine
  modified_base 171: mod_base = OTHER; note = thymine
  modified_base 173..174: mod_base = OTHER; note = thymine
  modified_base 177: mod_base = OTHER; note = thymine
  modified_base 179: mod_base = OTHER; note = thymine
  modified_base 183: mod_base = OTHER; note = thymine
  modified_base 186: mod_base = OTHER; note = thymine
  modified_base 189: mod_base = OTHER; note = thymine
  modified_base 191..192: mod_base = OTHER; note = thymine
  modified_base 195: mod_base = OTHER; note = thymine
  modified_base 198..199: mod_base = OTHER; note = thymine
  modified_base 201: mod_base = OTHER; note = thymine
  modified_base 203..204: mod_base = OTHER; note = thymine
  modified_base 207: mod_base = OTHER; note = thymine
  modified_base 210: mod_base = OTHER; note = thymine
  modified_base 212..213: mod_base = OTHER; note = thymine
  modified_base 216: mod_base = OTHER; note = thymine
  modified_base 219: mod_base = OTHER; note = thymine
  modified_base 222: mod_base = OTHER; note = thymine
  modified_base 225: mod_base = OTHER; note = thymine
  modified_base 228: mod_base = OTHER; note = thymine
  modified_base 231: mod_base = OTHER; note = thymine
  modified_base 234: mod_base = OTHER; note = thymine
  modified_base 236..237: mod_base = OTHER; note = thymine
  modified_base 239..240: mod_base = OTHER; note = thymine
  modified_base 243: mod_base = OTHER; note = thymine
  modified_base 246: mod_base = OTHER; note = thymine
  modified_base 249: mod_base = OTHER; note = thymine
  modified_base 252: mod_base = OTHER; note = thymine
  modified_base 254..255: mod_base = OTHER; note = thymine
  modified_base 257..258: mod_base = OTHER; note = thymine
  modified_base 264: mod_base = OTHER; note = thymine
  modified_base 270: mod_base = OTHER; note = thymine
  modified_base 272..273: mod_base = OTHER; note = thymine
  modified_base 275..276: mod_base = OTHER; note = thymine
  modified_base 282: mod_base = OTHER; note = thymine
  modified_base 285: mod_base = OTHER; note = thymine
  modified_base 288..291: mod_base = OTHER; note = thymine
  modified_base 294: mod_base = OTHER; note = thymine
  modified_base 300: mod_base = OTHER; note = thymine
  modified_base 303: mod_base = OTHER; note = thymine
  modified_base 305..306: mod_base = OTHER; note = thymine
  modified_base 308..309: mod_base = OTHER; note = thymine
  modified_base 313: mod_base = OTHER; note = thymine
  modified_base 315: mod_base = OTHER; note = thymine
  modified_base 317..318: mod_base = OTHER; note = thymine
  modified_base 321: mod_base = OTHER; note = thymine
  modified_base 324: mod_base = OTHER; note = thymine
  modified_base 327: mod_base = OTHER; note = thymine
  modified_base 330..331: mod_base = OTHER; note = thymine
  modified_base 338..339: mod_base = OTHER; note = thymine
  modified_base 342: mod_base = OTHER; note = thymine
  modified_base 345: mod_base = OTHER; note = thymine
  modified_base 348: mod_base = OTHER; note = thymine
  modified_base 351: mod_base = OTHER; note = thymine
  modified_base 353..354: mod_base = OTHER; note = thymine
  modified_base 357: mod_base = OTHER; note = thymine
  modified_base 360: mod_base = OTHER; note = thymine
  modified_base 365..366: mod_base = OTHER; note = thymine
  modified_base 369: mod_base = OTHER; note = thymine
  modified_base 372: mod_base = OTHER; note = thymine
  modified_base 374..375: mod_base = OTHER; note = thymine
  modified_base 379: mod_base = OTHER; note = thymine
  modified_base 382: mod_base = OTHER; note = thymine
  modified_base 384: mod_base = OTHER; note = thymine
  modified_base 387: mod_base = OTHER; note = thymine
  modified_base 389..390: mod_base = OTHER; note = thymine
  modified_base 392..393: mod_base = OTHER; note = thymine
  modified_base 395..396: mod_base = OTHER; note = thymine
  modified_base 399: mod_base = OTHER; note = thymine
  modified_base 401..402: mod_base = OTHER; note = thymine
  modified_base 404..405: mod_base = OTHER; note = thymine
  modified_base 411: mod_base = OTHER; note = thymine
  modified_base 414: mod_base = OTHER; note = thymine
  modified_base 417..418: mod_base = OTHER; note = thymine
  modified_base 420: mod_base = OTHER; note = thymine
  modified_base 422..424: mod_base = OTHER; note = thymine
  modified_base 426: mod_base = OTHER; note = thymine
  modified_base 432: mod_base = OTHER; note = thymine
  modified_base 438: mod_base = OTHER; note = thymine
  modified_base 444: mod_base = OTHER; note = thymine
  modified_base 450: mod_base = OTHER; note = thymine
  modified_base 453: mod_base = OTHER; note = thymine
  modified_base 456: mod_base = OTHER; note = thymine
  modified_base 464..465: mod_base = OTHER; note = thymine
  modified_base 468: mod_base = OTHER; note = thymine
  modified_base 471: mod_base = OTHER; note = thymine
  modified_base 473..474: mod_base = OTHER; note = thymine
  modified_base 476..477: mod_base = OTHER; note = thymine
  modified_base 483: mod_base = OTHER; note = thymine
  modified_base 485..486: mod_base = OTHER; note = thymine
  modified_base 489: mod_base = OTHER; note = thymine
  modified_base 492: mod_base = OTHER; note = thymine
  modified_base 495: mod_base = OTHER; note = thymine
  modified_base 498: mod_base = OTHER; note = thymine
  modified_base 501: mod_base = OTHER; note = thymine
  modified_base 504: mod_base = OTHER; note = thymine
  modified_base 506..507: mod_base = OTHER; note = thymine
  modified_base 513: mod_base = OTHER; note = thymine
  modified_base 516: mod_base = OTHER; note = thymine
  modified_base 519..522: mod_base = OTHER; note = thymine
  modified_base 525: mod_base = OTHER; note = thymine
  modified_base 528: mod_base = OTHER; note = thymine
  modified_base 531: mod_base = OTHER; note = thymine
  modified_base 534: mod_base = OTHER; note = thymine
  modified_base 539..540: mod_base = OTHER; note = thymine
  modified_base 543: mod_base = OTHER; note = thymine
  modified_base 545..546: mod_base = OTHER; note = thymine
  modified_base 549: mod_base = OTHER; note = thymine
  modified_base 553..555: mod_base = OTHER; note = thymine
  modified_base 565: mod_base = OTHER; note = thymine
  modified_base 567: mod_base = OTHER; note = thymine
  modified_base 570: mod_base = OTHER; note = thymine
  modified_base 573: mod_base = OTHER; note = thymine
  modified_base 575..576: mod_base = OTHER; note = thymine
  modified_base 579: mod_base = OTHER; note = thymine
  modified_base 582: mod_base = OTHER; note = thymine
  modified_base 588..589: mod_base = OTHER; note = thymine
  modified_base 591: mod_base = OTHER; note = thymine
  modified_base 594..595: mod_base = OTHER; note = thymine
  modified_base 597..598: mod_base = OTHER; note = thymine
  modified_base 600: mod_base = OTHER; note = thymine
  modified_base 603: mod_base = OTHER; note = thymine
  modified_base 606..610: mod_base = OTHER; note = thymine
  modified_base 612: mod_base = OTHER; note = thymine
  modified_base 615: mod_base = OTHER; note = thymine
  modified_base 621: mod_base = OTHER; note = thymine
  modified_base 623..624: mod_base = OTHER; note = thymine
  modified_base 630: mod_base = OTHER; note = thymine
  modified_base 635..636: mod_base = OTHER; note = thymine
  modified_base 638..639: mod_base = OTHER; note = thymine
  modified_base 641..642: mod_base = OTHER; note = thymine
  modified_base 644..648: mod_base = OTHER; note = thymine
  modified_base 664..666: mod_base = OTHER; note = thymine
  modified_base 669: mod_base = OTHER; note = thymine
  modified_base 672: mod_base = OTHER; note = thymine
  modified_base 675: mod_base = OTHER; note = thymine
  modified_base 678: mod_base = OTHER; note = thymine
  modified_base 680..682: mod_base = OTHER; note = thymine
  modified_base 684: mod_base = OTHER; note = thymine
  modified_base 687: mod_base = OTHER; note = thymine
  modified_base 690: mod_base = OTHER; note = thymine
  modified_base 692..693: mod_base = OTHER; note = thymine
  modified_base 702: mod_base = OTHER; note = thymine
  modified_base 704..705: mod_base = OTHER; note = thymine
  modified_base 711: mod_base = OTHER; note = thymine
  modified_base 713..714: mod_base = OTHER; note = thymine
  modified_base 716..717: mod_base = OTHER; note = thymine
  modified_base 719: mod_base = OTHER; note = thymine
  modified_base 723: mod_base = OTHER; note = thymine
  modified_base 729: mod_base = OTHER; note = thymine
  modified_base 732: mod_base = OTHER; note = thymine
  modified_base 735: mod_base = OTHER; note = thymine
  modified_base 737..739: mod_base = OTHER; note = thymine
  modified_base 741: mod_base = OTHER; note = thymine
  modified_base 744: mod_base = OTHER; note = thymine
  modified_base 747: mod_base = OTHER; note = thymine
  modified_base 750: mod_base = OTHER; note = thymine
  modified_base 752..753: mod_base = OTHER; note = thymine
  modified_base 761: mod_base = OTHER; note = thymine
  modified_base 764..765: mod_base = OTHER; note = thymine
  modified_base 768: mod_base = OTHER; note = thymine
  modified_base 771..772: mod_base = OTHER; note = thymine
  modified_base 774: mod_base = OTHER; note = thymine
  modified_base 777..780: mod_base = OTHER; note = thymine
  modified_base 786: mod_base = OTHER; note = thymine
  modified_base 789: mod_base = OTHER; note = thymine
  modified_base 795: mod_base = OTHER; note = thymine
  modified_base 801: mod_base = OTHER; note = thymine
  modified_base 804: mod_base = OTHER; note = thymine
  modified_base 810: mod_base = OTHER; note = thymine
  modified_base 813..814: mod_base = OTHER; note = thymine
  modified_base 816: mod_base = OTHER; note = thymine
  modified_base 819: mod_base = OTHER; note = thymine
  modified_base 822: mod_base = OTHER; note = thymine
  modified_base 828..831: mod_base = OTHER; note = thymine
  modified_base 833..835: mod_base = OTHER; note = thymine
  modified_base 839..840: mod_base = OTHER; note = thymine
  modified_base 843: mod_base = OTHER; note = thymine
  modified_base 848..849: mod_base = OTHER; note = thymine
  modified_base 852: mod_base = OTHER; note = thymine
  modified_base 855: mod_base = OTHER; note = thymine
  modified_base 857..858: mod_base = OTHER; note = thymine
  modified_base 861: mod_base = OTHER; note = thymine
  modified_base 863..864: mod_base = OTHER; note = thymine
  modified_base 866..867: mod_base = OTHER; note = thymine
  modified_base 876..877: mod_base = OTHER; note = thymine
  modified_base 879: mod_base = OTHER; note = thymine
  modified_base 885: mod_base = OTHER; note = thymine
  modified_base 888: mod_base = OTHER; note = thymine
  modified_base 890..891: mod_base = OTHER; note = thymine
  modified_base 894: mod_base = OTHER; note = thymine
  modified_base 897: mod_base = OTHER; note = thymine
  modified_base 900: mod_base = OTHER; note = thymine
  modified_base 906: mod_base = OTHER; note = thymine
  modified_base 909: mod_base = OTHER; note = thymine
  modified_base 912: mod_base = OTHER; note = thymine
  modified_base 914..915: mod_base = OTHER; note = thymine
  modified_base 917: mod_base = OTHER; note = thymine
  modified_base 921: mod_base = OTHER; note = thymine
  modified_base 927..928: mod_base = OTHER; note = thymine
  modified_base 930: mod_base = OTHER; note = thymine
  modified_base 933: mod_base = OTHER; note = thymine
  modified_base 937: mod_base = OTHER; note = thymine
  modified_base 939: mod_base = OTHER; note = thymine
  modified_base 944..945: mod_base = OTHER; note = thymine
  modified_base 948..949: mod_base = OTHER; note = thymine
  modified_base 951: mod_base = OTHER; note = thymine
  modified_base 954: mod_base = OTHER; note = thymine
  modified_base 960: mod_base = OTHER; note = thymine
  modified_base 963: mod_base = OTHER; note = thymine
  modified_base 968..969: mod_base = OTHER; note = thymine
  modified_base 971..972: mod_base = OTHER; note = thymine
  modified_base 975: mod_base = OTHER; note = thymine
  modified_base 977..978: mod_base = OTHER; note = thymine
  modified_base 984: mod_base = OTHER; note = thymine
  modified_base 987: mod_base = OTHER; note = thymine
  modified_base 990..996: mod_base = OTHER; note = thymine
  modified_base 1002: mod_base = OTHER; note = thymine
  modified_base 1004..1005: mod_base = OTHER; note = thymine
  modified_base 1008..1009: mod_base = OTHER; note = thymine
  modified_base 1011: mod_base = OTHER; note = thymine
  modified_base 1014: mod_base = OTHER; note = thymine
  modified_base 1020: mod_base = OTHER; note = thymine
  modified_base 1023: mod_base = OTHER; note = thymine
  modified_base 1026: mod_base = OTHER; note = thymine
  modified_base 1032..1033: mod_base = OTHER; note = thymine
  modified_base 1035: mod_base = OTHER; note = thymine
  modified_base 1038: mod_base = OTHER; note = thymine
  modified_base 1040..1041: mod_base = OTHER; note = thymine
  modified_base 1043: mod_base = OTHER; note = thymine
  modified_base 1049: mod_base = OTHER; note = thymine
  modified_base 1056..1057: mod_base = OTHER; note = thymine
  modified_base 1059: mod_base = OTHER; note = thymine
  modified_base 1062: mod_base = OTHER; note = thymine
  modified_base 1065: mod_base = OTHER; note = thymine
  modified_base 1067..1069: mod_base = OTHER; note = thymine
  modified_base 1071: mod_base = OTHER; note = thymine
  modified_base 1074: mod_base = OTHER; note = thymine
  modified_base 1077: mod_base = OTHER; note = thymine
  modified_base 1079..1080: mod_base = OTHER; note = thymine
  modified_base 1092: mod_base = OTHER; note = thymine
  modified_base 1094..1095: mod_base = OTHER; note = thymine
  modified_base 1101: mod_base = OTHER; note = thymine
  modified_base 1108: mod_base = OTHER; note = thymine
  modified_base 1110: mod_base = OTHER; note = thymine
  modified_base 1113: mod_base = OTHER; note = thymine
  modified_base 1115..1116: mod_base = OTHER; note = thymine
  modified_base 1119: mod_base = OTHER; note = thymine
  modified_base 1121..1123: mod_base = OTHER; note = thymine
  modified_base 1125: mod_base = OTHER; note = thymine
  modified_base 1128: mod_base = OTHER; note = thymine
  modified_base 1133..1134: mod_base = OTHER; note = thymine
  modified_base 1140: mod_base = OTHER; note = thymine
  modified_base 1145..1146: mod_base = OTHER; note = thymine
  modified_base 1149: mod_base = OTHER; note = thymine
  modified_base 1152: mod_base = OTHER; note = thymine
  modified_base 1155..1159: mod_base = OTHER; note = thymine
  modified_base 1161: mod_base = OTHER; note = thymine
  modified_base 1163..1167: mod_base = OTHER; note = thymine
  modified_base 1173: mod_base = OTHER; note = thymine
  modified_base 1176: mod_base = OTHER; note = thymine
  modified_base 1182: mod_base = OTHER; note = thymine
  modified_base 1184..1185: mod_base = OTHER; note = thymine
  modified_base 1188: mod_base = OTHER; note = thymine
  modified_base 1191: mod_base = OTHER; note = thymine
  modified_base 1194: mod_base = OTHER; note = thymine
  modified_base 1196..1197: mod_base = OTHER; note = thymine
  modified_base 1203: mod_base = OTHER; note = thymine
  modified_base 1206: mod_base = OTHER; note = thymine
  modified_base 1208..1209: mod_base = OTHER; note = thymine
  modified_base 1215: mod_base = OTHER; note = thymine
  modified_base 1220..1221: mod_base = OTHER; note = thymine
  modified_base 1223..1224: mod_base = OTHER; note = thymine
  modified_base 1230: mod_base = OTHER; note = thymine
  modified_base 1232..1233: mod_base = OTHER; note = thymine
  modified_base 1235..1236: mod_base = OTHER; note = thymine
  modified_base 1242: mod_base = OTHER; note = thymine
  modified_base 1244..1246: mod_base = OTHER; note = thymine
  modified_base 1248..1251: mod_base = OTHER; note = thymine
  modified_base 1254: mod_base = OTHER; note = thymine
  modified_base 1258..1260: mod_base = OTHER; note = thymine
  modified_base 1262..1263: mod_base = OTHER; note = thymine
  modified_base 1268..1270: mod_base = OTHER; note = thymine
  modified_base 1272: mod_base = OTHER; note = thymine
  modified_base 1274..1275: mod_base = OTHER; note = thymine
  modified_base 1281: mod_base = OTHER; note = thymine
  modified_base 1283..1284: mod_base = OTHER; note = thymine
  modified_base 1287: mod_base = OTHER; note = thymine
  modified_base 1290: mod_base = OTHER; note = thymine
  modified_base 1292..1293: mod_base = OTHER; note = thymine
  modified_base 1295..1296: mod_base = OTHER; note = thymine
  modified_base 1299: mod_base = OTHER; note = thymine
  modified_base 1301..1302: mod_base = OTHER; note = thymine
  modified_base 1304: mod_base = OTHER; note = thymine
  modified_base 1314: mod_base = OTHER; note = thymine
  modified_base 1320..1321: mod_base = OTHER; note = thymine
  modified_base 1323: mod_base = OTHER; note = thymine
  modified_base 1326: mod_base = OTHER; note = thymine
  modified_base 1332..1333: mod_base = OTHER; note = thymine
  modified_base 1335: mod_base = OTHER; note = thymine
  modified_base 1338: mod_base = OTHER; note = thymine
  modified_base 1343..1345: mod_base = OTHER; note = thymine
  modified_base 1347: mod_base = OTHER; note = thymine
  modified_base 1350: mod_base = OTHER; note = thymine
  modified_base 1353: mod_base = OTHER; note = thymine
  modified_base 1356..1357: mod_base = OTHER; note = thymine
  modified_base 1359: mod_base = OTHER; note = thymine
  modified_base 1362: mod_base = OTHER; note = thymine
  modified_base 1371: mod_base = OTHER; note = thymine
  modified_base 1374: mod_base = OTHER; note = thymine
  modified_base 1385..1387: mod_base = OTHER; note = thymine
  modified_base 1389: mod_base = OTHER; note = thymine
  modified_base 1391..1392: mod_base = OTHER; note = thymine
  modified_base 1395: mod_base = OTHER; note = thymine
  modified_base 1398: mod_base = OTHER; note = thymine
  modified_base 1400..1401: mod_base = OTHER; note = thymine
  modified_base 1404: mod_base = OTHER; note = thymine
  modified_base 1407: mod_base = OTHER; note = thymine
  modified_base 1410: mod_base = OTHER; note = thymine
  modified_base 1415..1416: mod_base = OTHER; note = thymine
  modified_base 1419: mod_base = OTHER; note = thymine
  modified_base 1422: mod_base = OTHER; note = thymine
  modified_base 1425: mod_base = OTHER; note = thymine
  modified_base 1427..1428: mod_base = OTHER; note = thymine
  modified_base 1430..1431: mod_base = OTHER; note = thymine
  modified_base 1433..1434: mod_base = OTHER; note = thymine
  modified_base 1437: mod_base = OTHER; note = thymine
  modified_base 1440: mod_base = OTHER; note = thymine
  modified_base 1442..1444: mod_base = OTHER; note = thymine
  modified_base 1446: mod_base = OTHER; note = thymine
  modified_base 1452: mod_base = OTHER; note = thymine
  modified_base 1455: mod_base = OTHER; note = thymine
  modified_base 1460..1461: mod_base = OTHER; note = thymine
  modified_base 1463..1464: mod_base = OTHER; note = thymine
  modified_base 1467: mod_base = OTHER; note = thymine
  modified_base 1470: mod_base = OTHER; note = thymine
  modified_base 1472..1473: mod_base = OTHER; note = thymine
  modified_base 1475..1476: mod_base = OTHER; note = thymine
  modified_base 1479: mod_base = OTHER; note = thymine
  modified_base 1482..1483: mod_base = OTHER; note = thymine
  modified_base 1485: mod_base = OTHER; note = thymine
  modified_base 1488..1489: mod_base = OTHER; note = thymine
  modified_base 1491: mod_base = OTHER; note = thymine
  modified_base 1494: mod_base = OTHER; note = thymine
  modified_base 1497: mod_base = OTHER; note = thymine
  modified_base 1500: mod_base = OTHER; note = thymine
  modified_base 1502..1503: mod_base = OTHER; note = thymine
  modified_base 1506: mod_base = OTHER; note = thymine
  modified_base 1508..1509: mod_base = OTHER; note = thymine
  modified_base 1515: mod_base = OTHER; note = thymine
  modified_base 1518: mod_base = OTHER; note = thymine
  modified_base 1521: mod_base = OTHER; note = thymine
  modified_base 1526..1527: mod_base = OTHER; note = thymine
  modified_base 1530: mod_base = OTHER; note = thymine
  modified_base 1534: mod_base = OTHER; note = thymine
  modified_base 1536..1539: mod_base = OTHER; note = thymine
  modified_base 1545: mod_base = OTHER; note = thymine
  modified_base 1548: mod_base = OTHER; note = thymine
  modified_base 1556..1557: mod_base = OTHER; note = thymine
  modified_base 1566: mod_base = OTHER; note = thymine
  modified_base 1578: mod_base = OTHER; note = thymine
  modified_base 1581: mod_base = OTHER; note = thymine
  modified_base 1587: mod_base = OTHER; note = thymine
  modified_base 1590: mod_base = OTHER; note = thymine
  modified_base 1599: mod_base = OTHER; note = thymine
  modified_base 1602: mod_base = OTHER; note = thymine
  modified_base 1605: mod_base = OTHER; note = thymine
  modified_base 1609..1611: mod_base = OTHER; note = thymine
  modified_base 1614: mod_base = OTHER; note = thymine
  modified_base 1618: mod_base = OTHER; note = thymine
  modified_base 1620..1623: mod_base = OTHER; note = thymine
  modified_base 1626: mod_base = OTHER; note = thymine
  modified_base 1629..1632: mod_base = OTHER; note = thymine
  modified_base 1634..1635: mod_base = OTHER; note = thymine
  modified_base 1638: mod_base = OTHER; note = thymine
  modified_base 1644: mod_base = OTHER; note = thymine
  modified_base 1648: mod_base = OTHER; note = thymine
  modified_base 1650: mod_base = OTHER; note = thymine
  modified_base 1656: mod_base = OTHER; note = thymine
  modified_base 1658..1659: mod_base = OTHER; note = thymine
  modified_base 1661..1662: mod_base = OTHER; note = thymine
  modified_base 1667..1668: mod_base = OTHER; note = thymine
  modified_base 1671: mod_base = OTHER; note = thymine
  modified_base 1673..1675: mod_base = OTHER; note = thymine
  modified_base 1677: mod_base = OTHER; note = thymine
  modified_base 1689: mod_base = OTHER; note = thymine
  modified_base 1692: mod_base = OTHER; note = thymine
  modified_base 1696: mod_base = OTHER; note = thymine
  modified_base 1698: mod_base = OTHER; note = thymine
  modified_base 1700..1702: mod_base = OTHER; note = thymine
  modified_base 1704..1705: mod_base = OTHER; note = thymine
  modified_base 1707: mod_base = OTHER; note = thymine
  modified_base 1710: mod_base = OTHER; note = thymine
  modified_base 1718..1719: mod_base = OTHER; note = thymine
  modified_base 1722: mod_base = OTHER; note = thymine
  modified_base 1724..1725: mod_base = OTHER; note = thymine
  modified_base 1728: mod_base = OTHER; note = thymine
  modified_base 1731: mod_base = OTHER; note = thymine
  modified_base 1733..1734: mod_base = OTHER; note = thymine
  modified_base 1737: mod_base = OTHER; note = thymine
  modified_base 1746..1747: mod_base = OTHER; note = thymine
  modified_base 1749: mod_base = OTHER; note = thymine
  modified_base 1751..1752: mod_base = OTHER; note = thymine
  modified_base 1757..1758: mod_base = OTHER; note = thymine
  modified_base 1761: mod_base = OTHER; note = thymine
  modified_base 1764: mod_base = OTHER; note = thymine
  modified_base 1767: mod_base = OTHER; note = thymine
  modified_base 1769..1770: mod_base = OTHER; note = thymine
  modified_base 1773..1777: mod_base = OTHER; note = thymine
  modified_base 1779: mod_base = OTHER; note = thymine
  modified_base 1782: mod_base = OTHER; note = thymine
  modified_base 1785..1786: mod_base = OTHER; note = thymine
  modified_base 1791: mod_base = OTHER; note = thymine
  modified_base 1794..1795: mod_base = OTHER; note = thymine
  modified_base 1797..1800: mod_base = OTHER; note = thymine
  modified_base 1803: mod_base = OTHER; note = thymine
  modified_base 1806: mod_base = OTHER; note = thymine
  modified_base 1811..1812: mod_base = OTHER; note = thymine
  modified_base 1814..1815: mod_base = OTHER; note = thymine
  modified_base 1817..1818: mod_base = OTHER; note = thymine
  modified_base 1820..1821: mod_base = OTHER; note = thymine
  modified_base 1824..1825: mod_base = OTHER; note = thymine
  modified_base 1827: mod_base = OTHER; note = thymine
  modified_base 1833: mod_base = OTHER; note = thymine
  modified_base 1839: mod_base = OTHER; note = thymine
  modified_base 1845: mod_base = OTHER; note = thymine
  modified_base 1848: mod_base = OTHER; note = thymine
  modified_base 1854: mod_base = OTHER; note = thymine
  modified_base 1857..1858: mod_base = OTHER; note = thymine
  modified_base 1860: mod_base = OTHER; note = thymine
  modified_base 1864: mod_base = OTHER; note = thymine
  modified_base 1866..1869: mod_base = OTHER; note = thymine
  modified_base 1872: mod_base = OTHER; note = thymine
  modified_base 1875: mod_base = OTHER; note = thymine
  modified_base 1881: mod_base = OTHER; note = thymine
  modified_base 1884..1885: mod_base = OTHER; note = thymine
  modified_base 1887: mod_base = OTHER; note = thymine
  modified_base 1890: mod_base = OTHER; note = thymine
  modified_base 1894: mod_base = OTHER; note = thymine
  modified_base 1903..1905: mod_base = OTHER; note = thymine
  modified_base 1911: mod_base = OTHER; note = thymine
  modified_base 1914: mod_base = OTHER; note = thymine
  modified_base 1916..1917: mod_base = OTHER; note = thymine
  modified_base 1923..1924: mod_base = OTHER; note = thymine
  modified_base 1926: mod_base = OTHER; note = thymine
  modified_base 1929..1932: mod_base = OTHER; note = thymine
  modified_base 1935: mod_base = OTHER; note = thymine
  modified_base 1938..1939: mod_base = OTHER; note = thymine
  modified_base 1941: mod_base = OTHER; note = thymine
  modified_base 1953: mod_base = OTHER; note = thymine
  modified_base 1955..1956: mod_base = OTHER; note = thymine
  modified_base 1958..1959: mod_base = OTHER; note = thymine
  modified_base 1961..1962: mod_base = OTHER; note = thymine
  modified_base 1969..1971: mod_base = OTHER; note = thymine
  modified_base 1974: mod_base = OTHER; note = thymine
  modified_base 1980: mod_base = OTHER; note = thymine
  modified_base 1983..1986: mod_base = OTHER; note = thymine
  modified_base 1995: mod_base = OTHER; note = thymine
  modified_base 1998: mod_base = OTHER; note = thymine
  modified_base 2000..2001: mod_base = OTHER; note = thymine
  modified_base 2004: mod_base = OTHER; note = thymine
  modified_base 2007: mod_base = OTHER; note = thymine
  modified_base 2010: mod_base = OTHER; note = thymine
  modified_base 2013..2014: mod_base = OTHER; note = thymine
  modified_base 2016: mod_base = OTHER; note = thymine
  modified_base 2018..2019: mod_base = OTHER; note = thymine
  modified_base 2022: mod_base = OTHER; note = thymine
  modified_base 2025..2028: mod_base = OTHER; note = thymine
  modified_base 2030..2032: mod_base = OTHER; note = thymine
  modified_base 2034: mod_base = OTHER; note = thymine
  modified_base 2038..2040: mod_base = OTHER; note = thymine
  modified_base 2042..2043: mod_base = OTHER; note = thymine
  modified_base 2046: mod_base = OTHER; note = thymine
  modified_base 2049: mod_base = OTHER; note = thymine
  modified_base 2052: mod_base = OTHER; note = thymine
  modified_base 2054: mod_base = OTHER; note = thymine
  modified_base 2058: mod_base = OTHER; note = thymine
  modified_base 2060..2061: mod_base = OTHER; note = thymine
  modified_base 2064: mod_base = OTHER; note = thymine
  modified_base 2067: mod_base = OTHER; note = thymine
  modified_base 2073: mod_base = OTHER; note = thymine
  modified_base 2082: mod_base = OTHER; note = thymine
  modified_base 2084..2088: mod_base = OTHER; note = thymine
  modified_base 2091..2092: mod_base = OTHER; note = thymine
  modified_base 2094: mod_base = OTHER; note = thymine
  modified_base 2097: mod_base = OTHER; note = thymine
  modified_base 2100: mod_base = OTHER; note = thymine
  modified_base 2105..2106: mod_base = OTHER; note = thymine
  modified_base 2109: mod_base = OTHER; note = thymine
  modified_base 2112: mod_base = OTHER; note = thymine
  modified_base 2114..2115: mod_base = OTHER; note = thymine
  modified_base 2117..2118: mod_base = OTHER; note = thymine
  modified_base 2121: mod_base = OTHER; note = thymine
  modified_base 2124..2128: mod_base = OTHER; note = thymine
  modified_base 2133: mod_base = OTHER; note = thymine
  modified_base 2135..2136: mod_base = OTHER; note = thymine
  modified_base 2139: mod_base = OTHER; note = thymine
  modified_base 2144..2145: mod_base = OTHER; note = thymine
  modified_base 2148: mod_base = OTHER; note = thymine
  modified_base 2151: mod_base = OTHER; note = thymine
  modified_base 2157: mod_base = OTHER; note = thymine
  modified_base 2160: mod_base = OTHER; note = thymine
  modified_base 2163: mod_base = OTHER; note = thymine
  modified_base 2166: mod_base = OTHER; note = thymine
  modified_base 2169: mod_base = OTHER; note = thymine
  modified_base 2172: mod_base = OTHER; note = thymine
  modified_base 2174..2175: mod_base = OTHER; note = thymine
  modified_base 2178: mod_base = OTHER; note = thymine
  modified_base 2181: mod_base = OTHER; note = thymine
  modified_base 2183..2184: mod_base = OTHER; note = thymine
  modified_base 2186..2187: mod_base = OTHER; note = thymine
  modified_base 2189..2190: mod_base = OTHER; note = thymine
  modified_base 2193..2194: mod_base = OTHER; note = thymine
  modified_base 2196..2197: mod_base = OTHER; note = thymine
  modified_base 2199: mod_base = OTHER; note = thymine
  modified_base 2202: mod_base = OTHER; note = thymine
  modified_base 2204..2205: mod_base = OTHER; note = thymine
  modified_base 2208: mod_base = OTHER; note = thymine
  modified_base 2210: mod_base = OTHER; note = thymine
  modified_base 2222..2223: mod_base = OTHER; note = thymine
  modified_base 2226: mod_base = OTHER; note = thymine
  modified_base 2229..2232: mod_base = OTHER; note = thymine
  modified_base 2234..2235: mod_base = OTHER; note = thymine
  modified_base 2238..2239: mod_base = OTHER; note = thymine
  modified_base 2241: mod_base = OTHER; note = thymine
  modified_base 2249: mod_base = OTHER; note = thymine
  modified_base 2253: mod_base = OTHER; note = thymine
  modified_base 2256..2259: mod_base = OTHER; note = thymine
  modified_base 2262: mod_base = OTHER; note = thymine
  modified_base 2265: mod_base = OTHER; note = thymine
  modified_base 2271: mod_base = OTHER; note = thymine
  modified_base 2273..2274: mod_base = OTHER; note = thymine
  modified_base 2277: mod_base = OTHER; note = thymine
  modified_base 2286: mod_base = OTHER; note = thymine
  modified_base 2289: mod_base = OTHER; note = thymine
  modified_base 2294..2295: mod_base = OTHER; note = thymine
  modified_base 2297..2298: mod_base = OTHER; note = thymine
  modified_base 2301: mod_base = OTHER; note = thymine
  modified_base 2310: mod_base = OTHER; note = thymine
  modified_base 2313..2316: mod_base = OTHER; note = thymine
  modified_base 2319: mod_base = OTHER; note = thymine
  modified_base 2325..2326: mod_base = OTHER; note = thymine
  modified_base 2332..2337: mod_base = OTHER; note = thymine
  modified_base 2340: mod_base = OTHER; note = thymine
  modified_base 2348..2349: mod_base = OTHER; note = thymine
  modified_base 2351: mod_base = OTHER; note = thymine
  modified_base 2354..2355: mod_base = OTHER; note = thymine
  modified_base 2358: mod_base = OTHER; note = thymine
  modified_base 2360..2364: mod_base = OTHER; note = thymine
  modified_base 2367: mod_base = OTHER; note = thymine
  modified_base 2373: mod_base = OTHER; note = thymine
  modified_base 2376: mod_base = OTHER; note = thymine
  modified_base 2379: mod_base = OTHER; note = thymine
  modified_base 2385: mod_base = OTHER; note = thymine
  modified_base 2389..2391: mod_base = OTHER; note = thymine
  modified_base 2400: mod_base = OTHER; note = thymine
  modified_base 2403: mod_base = OTHER; note = thymine
  modified_base 2406: mod_base = OTHER; note = thymine
  modified_base 2408..2409: mod_base = OTHER; note = thymine
  modified_base 2417..2418: mod_base = OTHER; note = thymine
  modified_base 2421: mod_base = OTHER; note = thymine
  modified_base 2424: mod_base = OTHER; note = thymine
  modified_base 2426..2427: mod_base = OTHER; note = thymine
  modified_base 2429..2430: mod_base = OTHER; note = thymine
  modified_base 2433: mod_base = OTHER; note = thymine
  modified_base 2441..2443: mod_base = OTHER; note = thymine
  modified_base 2445..2446: mod_base = OTHER; note = thymine
  modified_base 2448: mod_base = OTHER; note = thymine
  modified_base 2451: mod_base = OTHER; note = thymine
  modified_base 2454: mod_base = OTHER; note = thymine
  modified_base 2460: mod_base = OTHER; note = thymine
  modified_base 2462..2463: mod_base = OTHER; note = thymine
  modified_base 2466: mod_base = OTHER; note = thymine
  modified_base 2470: mod_base = OTHER; note = thymine
  modified_base 2472: mod_base = OTHER; note = thymine
  modified_base 2474..2475: mod_base = OTHER; note = thymine
  modified_base 2478: mod_base = OTHER; note = thymine
  modified_base 2481: mod_base = OTHER; note = thymine
  modified_base 2483..2487: mod_base = OTHER; note = thymine
  modified_base 2489..2491: mod_base = OTHER; note = thymine
  modified_base 2493: mod_base = OTHER; note = thymine
  modified_base 2496: mod_base = OTHER; note = thymine
  modified_base 2499: mod_base = OTHER; note = thymine
  modified_base 2502: mod_base = OTHER; note = thymine
  modified_base 2505: mod_base = OTHER; note = thymine
  modified_base 2508: mod_base = OTHER; note = thymine
  modified_base 2513: mod_base = OTHER; note = thymine
  modified_base 2515: mod_base = OTHER; note = thymine
  modified_base 2517: mod_base = OTHER; note = thymine
  modified_base 2520: mod_base = OTHER; note = thymine
  modified_base 2526: mod_base = OTHER; note = thymine
  modified_base 2529: mod_base = OTHER; note = thymine
  modified_base 2531: mod_base = OTHER; note = thymine
  modified_base 2538: mod_base = OTHER; note = thymine
  modified_base 2540..2541: mod_base = OTHER; note = thymine
  modified_base 2545: mod_base = OTHER; note = thymine
  modified_base 2547: mod_base = OTHER; note = thymine
  modified_base 2550: mod_base = OTHER; note = thymine
  modified_base 2556: mod_base = OTHER; note = thymine
  modified_base 2558..2559: mod_base = OTHER; note = thymine
  modified_base 2562: mod_base = OTHER; note = thymine
  modified_base 2568: mod_base = OTHER; note = thymine
  modified_base 2570..2572: mod_base = OTHER; note = thymine
  modified_base 2574: mod_base = OTHER; note = thymine
  modified_base 2576..2577: mod_base = OTHER; note = thymine
  modified_base 2579..2580: mod_base = OTHER; note = thymine
  modified_base 2583: mod_base = OTHER; note = thymine
  modified_base 2585..2586: mod_base = OTHER; note = thymine
  modified_base 2589: mod_base = OTHER; note = thymine
  modified_base 2591..2592: mod_base = OTHER; note = thymine
  modified_base 2595: mod_base = OTHER; note = thymine
  modified_base 2600..2601: mod_base = OTHER; note = thymine
  modified_base 2606..2607: mod_base = OTHER; note = thymine
  modified_base 2613: mod_base = OTHER; note = thymine
  modified_base 2615..2616: mod_base = OTHER; note = thymine
  modified_base 2624: mod_base = OTHER; note = thymine
  modified_base 2627..2628: mod_base = OTHER; note = thymine
  modified_base 2631: mod_base = OTHER; note = thymine
  modified_base 2634: mod_base = OTHER; note = thymine
  modified_base 2640: mod_base = OTHER; note = thymine
  modified_base 2646: mod_base = OTHER; note = thymine
  modified_base 2651..2653: mod_base = OTHER; note = thymine
  modified_base 2655: mod_base = OTHER; note = thymine
  modified_base 2661: mod_base = OTHER; note = thymine
  modified_base 2663..2664: mod_base = OTHER; note = thymine
  modified_base 2670: mod_base = OTHER; note = thymine
  modified_base 2673: mod_base = OTHER; note = thymine
  modified_base 2675..2676: mod_base = OTHER; note = thymine
  modified_base 2682: mod_base = OTHER; note = thymine
  modified_base 2685: mod_base = OTHER; note = thymine
  modified_base 2691: mod_base = OTHER; note = thymine
  modified_base 2694: mod_base = OTHER; note = thymine
  modified_base 2697: mod_base = OTHER; note = thymine
  modified_base 2700: mod_base = OTHER; note = thymine
  modified_base 2706..2709: mod_base = OTHER; note = thymine
  modified_base 2712: mod_base = OTHER; note = thymine
  modified_base 2718..2722: mod_base = OTHER; note = thymine
  modified_base 2724: mod_base = OTHER; note = thymine
  modified_base 2728: mod_base = OTHER; note = thymine
  modified_base 2730: mod_base = OTHER; note = thymine
  modified_base 2733: mod_base = OTHER; note = thymine
  modified_base 2739: mod_base = OTHER; note = thymine
  modified_base 2742: mod_base = OTHER; note = thymine
  modified_base 2745: mod_base = OTHER; note = thymine
  modified_base 2748: mod_base = OTHER; note = thymine
  modified_base 2751: mod_base = OTHER; note = thymine
  modified_base 2759..2760: mod_base = OTHER; note = thymine
  modified_base 2766: mod_base = OTHER; note = thymine
  modified_base 2768..2769: mod_base = OTHER; note = thymine
  modified_base 2772: mod_base = OTHER; note = thymine
  modified_base 2774..2775: mod_base = OTHER; note = thymine
  modified_base 2783..2784: mod_base = OTHER; note = thymine
  modified_base 2793: mod_base = OTHER; note = thymine
  modified_base 2796: mod_base = OTHER; note = thymine
  modified_base 2798..2800: mod_base = OTHER; note = thymine
  modified_base 2804..2805: mod_base = OTHER; note = thymine
  modified_base 2808: mod_base = OTHER; note = thymine
  modified_base 2811: mod_base = OTHER; note = thymine
  modified_base 2814: mod_base = OTHER; note = thymine
  modified_base 2817: mod_base = OTHER; note = thymine
  modified_base 2820: mod_base = OTHER; note = thymine
  modified_base 2822..2823: mod_base = OTHER; note = thymine
  modified_base 2826: mod_base = OTHER; note = thymine
  modified_base 2829: mod_base = OTHER; note = thymine
  modified_base 2832: mod_base = OTHER; note = thymine
  modified_base 2835: mod_base = OTHER; note = thymine
  modified_base 2838: mod_base = OTHER; note = thymine
  modified_base 2840: mod_base = OTHER; note = thymine
  modified_base 2843..2844: mod_base = OTHER; note = thymine
  modified_base 2847: mod_base = OTHER; note = thymine
  modified_base 2849..2850: mod_base = OTHER; note = thymine
  modified_base 2853: mod_base = OTHER; note = thymine
  modified_base 2855..2859: mod_base = OTHER; note = thymine
  modified_base 2868: mod_base = OTHER; note = thymine
  modified_base 2871: mod_base = OTHER; note = thymine
  modified_base 2875: mod_base = OTHER; note = thymine
  modified_base 2877..2878: mod_base = OTHER; note = thymine
  modified_base 2880: mod_base = OTHER; note = thymine
  modified_base 2882..2883: mod_base = OTHER; note = thymine
  modified_base 2885..2886: mod_base = OTHER; note = thymine
  modified_base 2889: mod_base = OTHER; note = thymine
  modified_base 2891..2893: mod_base = OTHER; note = thymine
  modified_base 2895..2896: mod_base = OTHER; note = thymine
  modified_base 2898..2899: mod_base = OTHER; note = thymine
  modified_base 2906..2907: mod_base = OTHER; note = thymine
  modified_base 2910: mod_base = OTHER; note = thymine
  modified_base 2916: mod_base = OTHER; note = thymine
  modified_base 2918..2919: mod_base = OTHER; note = thymine
  modified_base 2921..2922: mod_base = OTHER; note = thymine
  modified_base 2925: mod_base = OTHER; note = thymine
  modified_base 2928: mod_base = OTHER; note = thymine
  modified_base 2931: mod_base = OTHER; note = thymine
  modified_base 2934: mod_base = OTHER; note = thymine
  modified_base 2936..2937: mod_base = OTHER; note = thymine
  modified_base 2939..2940: mod_base = OTHER; note = thymine
  modified_base 2946: mod_base = OTHER; note = thymine
  modified_base 2952: mod_base = OTHER; note = thymine
  modified_base 2961..2962: mod_base = OTHER; note = thymine
  modified_base 2969..2970: mod_base = OTHER; note = thymine
  modified_base 2972..2973: mod_base = OTHER; note = thymine
  modified_base 2976: mod_base = OTHER; note = thymine
  modified_base 2979..2980: mod_base = OTHER; note = thymine
  modified_base 2982..2985: mod_base = OTHER; note = thymine
  modified_base 2988..2991: mod_base = OTHER; note = thymine
  modified_base 2995..2998: mod_base = OTHER; note = thymine
  modified_base 3000: mod_base = OTHER; note = thymine
  modified_base 3002..3003: mod_base = OTHER; note = thymine
  modified_base 3006: mod_base = OTHER; note = thymine
  modified_base 3009: mod_base = OTHER; note = thymine
  modified_base 3012: mod_base = OTHER; note = thymine
  modified_base 3015: mod_base = OTHER; note = thymine
  modified_base 3017..3018: mod_base = OTHER; note = thymine
  modified_base 3020..3021: mod_base = OTHER; note = thymine
  modified_base 3026..3027: mod_base = OTHER; note = thymine
  modified_base 3029..3030: mod_base = OTHER; note = thymine
  modified_base 3033: mod_base = OTHER; note = thymine
  modified_base 3042: mod_base = OTHER; note = thymine
  modified_base 3045: mod_base = OTHER; note = thymine
  modified_base 3047: mod_base = OTHER; note = thymine
  modified_base 3049..3051: mod_base = OTHER; note = thymine
  modified_base 3054..3055: mod_base = OTHER; note = thymine
  modified_base 3057..3060: mod_base = OTHER; note = thymine
  modified_base 3063..3064: mod_base = OTHER; note = thymine
  modified_base 3066..3067: mod_base = OTHER; note = thymine
  modified_base 3069: mod_base = OTHER; note = thymine
  modified_base 3072: mod_base = OTHER; note = thymine
  modified_base 3075: mod_base = OTHER; note = thymine
  modified_base 3078: mod_base = OTHER; note = thymine
  modified_base 3081: mod_base = OTHER; note = thymine
  modified_base 3084: mod_base = OTHER; note = thymine
  modified_base 3087: mod_base = OTHER; note = thymine
  modified_base 3089..3090: mod_base = OTHER; note = thymine
  modified_base 3093: mod_base = OTHER; note = thymine
  modified_base 3095..3096: mod_base = OTHER; note = thymine
  modified_base 3099: mod_base = OTHER; note = thymine
  modified_base 3101..3102: mod_base = OTHER; note = thymine
  modified_base 3105: mod_base = OTHER; note = thymine
  modified_base 3108: mod_base = OTHER; note = thymine
  modified_base 3110..3111: mod_base = OTHER; note = thymine
  modified_base 3114: mod_base = OTHER; note = thymine
  modified_base 3117: mod_base = OTHER; note = thymine
  modified_base 3122..3123: mod_base = OTHER; note = thymine
  modified_base 3126: mod_base = OTHER; note = thymine
  modified_base 3132: mod_base = OTHER; note = thymine
  modified_base 3135: mod_base = OTHER; note = thymine
  modified_base 3137..3138: mod_base = OTHER; note = thymine
  modified_base 3140..3141: mod_base = OTHER; note = thymine
  modified_base 3147: mod_base = OTHER; note = thymine
  modified_base 3149..3150: mod_base = OTHER; note = thymine
  modified_base 3153: mod_base = OTHER; note = thymine
  modified_base 3155..3156: mod_base = OTHER; note = thymine
  modified_base 3162: mod_base = OTHER; note = thymine
  modified_base 3165: mod_base = OTHER; note = thymine
  modified_base 3167..3169: mod_base = OTHER; note = thymine
  modified_base 3171..3174: mod_base = OTHER; note = thymine
  modified_base 3181: mod_base = OTHER; note = thymine
  modified_base 3183: mod_base = OTHER; note = thymine
  modified_base 3188..3189: mod_base = OTHER; note = thymine
  modified_base 3192: mod_base = OTHER; note = thymine
  modified_base 3197..3198: mod_base = OTHER; note = thymine
  modified_base 3201: mod_base = OTHER; note = thymine
  modified_base 3209..3210: mod_base = OTHER; note = thymine
  modified_base 3213: mod_base = OTHER; note = thymine
  modified_base 3216..3217: mod_base = OTHER; note = thymine
  modified_base 3219: mod_base = OTHER; note = thymine
  modified_base 3222: mod_base = OTHER; note = thymine
  modified_base 3224..3225: mod_base = OTHER; note = thymine
  modified_base 3234: mod_base = OTHER; note = thymine
  modified_base 3237: mod_base = OTHER; note = thymine
  modified_base 3240: mod_base = OTHER; note = thymine
  modified_base 3242..3243: mod_base = OTHER; note = thymine
  modified_base 3246: mod_base = OTHER; note = thymine
  misc_feature 1..3249: note = Synthetic
  source 1..3249: mol_type = other RNA
atggctgcttttaagcctaattctattaattatattcttggtcttgctattggtattgcttctgttggttgggctatggttgagattgatgaggaggagaatcctattcgtcttattgatcttggtgttcgtgtttttgagcgtgctgaggttcctaagactggtgattctcttgctatggctcgtcgtcttgctcgttctgttcgtcgtcttactcgtcgtcgtgctcatcgtcttcttcgtactcgtcgtcttcttaagcgtgagggtgttcttcaggctgctaattttgatgagaatggtcttattaagtctcttcctaatactccttggcagcttcgtgctgctgctcttgatcgtaagcttactcctcttgagtggtctgctgttcttcttcatcttattaagcatcgtggttatctttctcagcgtaagaatgagggtgagactgctgataaggagcttggtgctcttcttaagggtgttgctggtaatgctcatgctcttcagactggtgattttcgtactcctgctgagcttgctcttaataagtttgagaaggagtctggtcatattcgtaatcagcgttctgattattctcatactttttctcgtaaggatcttcaggctgagcttattcttctttttgagaagcagaaggagtttggtaatcctcatgtttctggtggtcttaaggagggtattgagactcttcttatgactcagcgtcctgctctttctggtgatgctgttcagaagatgcttggtcattgtacttttgagcctgctgagcctaaggctgctaagaatacttatactgctgagcgttttatttggcttactaagcttaataatcttcgtattcttgagcagggttctgagcgtcctcttactgatactgagcgtgctactcttatggatgagccttatcgtaagtctaagcttacttatgctcaggctcgtaagcttcttggtcttgaggatactgctttttttaagggtcttcgttatggtaaggataatgctgaggcttctactcttatggagatgaaggcttatcatgctatttctcgtgctcttgagaaggagggtcttaaggataagaagtctcctcttaatctttctcctgagcttcaggatgagattggtactgctttttctctttttaagactgatgaggatattactggtcgtcttaaggatcgtattcagcctgagattcttgaggctcttcttaagcatatttcttttgataagtttgttcagatttctcttaaggctcttcgtcgtattgttcctcttatggagcagggtaagcgttatgatgaggcttgtgctgagatttatggtgatcattatggtaagaagaatactgaggagaagatttatcttcctcctattcctgctgatgagattcgtaatcctgttgttcttcgtgctctttctcaggctcgtaaggttattaatggtgttgttcgtcgttatggttctcctgctcgtattcatattgagactgctcgtgaggttggtaagtcttttaaggatcgtaaggagattgagaagcgtcaggaggagaatcgtaaggatcgtgagaaggctgctgctaagtttcgtgagtattttcctaattttgttggtgagcctaagtctaaggatattcttaagcttcgtctttatgagcagcagcatggtaagtgtctttattctggtaaggagattaatcttggtcgtcttaatgagaagggttatgttgagattgatcatgctcttcctttttctcgtacttgggatgattcttttaataataaggttcttgttcttggttctgagaatcagaataagggtaatcagactccttatgagtattttaatggtaaggataattctcgtgagtggcaggagtttaaggctcgtgttgagacttctcgttttcctcgttctaagaagcagcgtattcttcttcagaagtttgatgaggatggttttaaggagcgtaatcttaatgatactcgttatgttaatcgttttctttgtcagtttgttgctgatcgtatgcgtcttactggtaagggtaagaagcgtgtttttgcttctaatggtcagattactaatcttcttcgtggtttttggggtcttcgtaaggttcgtgctgagaatgatcgtcatcatgctcttgatgctgttgttgttgcttgttctactgttgctatgcagcagaagattactcgttttgttcgttataaggagatgaatgcttttgatggtaagactattgataaggagactggtgaggttcttcatcagaagactcattttcctcagccttgggagttttttgctcaggaggttatgattcgtgtttttggtaagcctgatggtaagcctgagtttgaggaggctgatactcttgagaagcttcgtactcttcttgctgagaagctttcttctcgtcctgaggctgttcatgagtatgttactcctctttttgtttctcgtgctcctaatcgtaagatgtctggtcagggtcatatggagactgttaagtctgctaagcgtcttgatgagggtgtttctgttcttcgtgttcctcttactcagcttaagcttaaggatcttgagaagatggttaatcgtgagcgtgagcctaagctttatgaggctcttaaggctcgtcttgaggctcataaggatgatcctgctaaggcttttgctgagcctttttataagtatgataaggctggtaatcgtactcagcaggttaaggctgttcgtgttgagcaggttcagaagactggtgtttgggttcgtaatcataatggtattgctgataatgctactatggttcgtgttgatgtttttgagaagggtgataagtattatcttgttcctatttattcttggcaggttgctaagggtattcttcctgatcgtgctgttgttcagggtaaggatgaggaggattggcagcttattgatgattcttttaattttaagttttctcttcatcctaatgatcttgttgaggttattactaagaaggctcgtatgtttggttattttgcttcttgtcatcgtggtactggtaatattaatattcgtattcatgatcttgatcataagattggtaagaatggtattcttgagggtattggtgttaagactgctctttcttttcagaagtatcagattgatgagcttggtaaggagattcgtccttgtcgtcttaagaagcgtcctcctgttcgttga

SEQ ID NO: 239 - RNA, 3249 nt, synthetic construct
  modified_base 2: mod_base = OTHER; note = thymine
  modified_base 10..11: mod_base = OTHER; note = thymine
  modified_base 22: mod_base = OTHER; note = thymine
  modified_base 26: mod_base = OTHER; note = thymine
  modified_base 31: mod_base = OTHER; note = thymine
  modified_base 35: mod_base = OTHER; note = thymine
  modified_base 38: mod_base = OTHER; note = thymine
  modified_base 44: mod_base = OTHER; note = thymine
  modified_base 50: mod_base = OTHER; note = thymine
  modified_base 56: mod_base = OTHER; note = thymine
  modified_base 61: mod_base = OTHER; note = thymine
  modified_base 65: mod_base = OTHER; note = thymine
  modified_base 70: mod_base = OTHER; note = thymine
  modified_base 77: mod_base = OTHER; note = thymine
  modified_base 80: mod_base = OTHER; note = thymine
  modified_base 86: mod_base = OTHER; note = thymine
  modified_base 107: mod_base = OTHER; note = thymine
  modified_base 113: mod_base = OTHER; note = thymine
  modified_base 116: mod_base = OTHER; note = thymine
  modified_base 122: mod_base = OTHER; note = thymine
  modified_base 128: mod_base = OTHER; note = thymine
  modified_base 134: mod_base = OTHER; note = thymine
  modified_base 136..137: mod_base = OTHER; note = thymine
  modified_base 152: mod_base = OTHER; note = thymine
  modified_base 169: mod_base = OTHER; note = thymine
  modified_base 173: mod_base = OTHER; note = thymine
  modified_base 179: mod_base = OTHER; note = thymine
  modified_base 191: mod_base = OTHER; note = thymine
  modified_base 199: mod_base = OTHER; note = thymine
  modified_base 203: mod_base = OTHER; note = thymine
  modified_base 212: mod_base = OTHER; note = thymine
  modified_base 236: mod_base = OTHER; note = thymine
  modified_base 239: mod_base = OTHER; note = thymine
  modified_base 254: mod_base = OTHER; note = thymine
  modified_base 257: mod_base = OTHER; note = thymine
  modified_base 272: mod_base = OTHER; note = thymine
  modified_base 275: mod_base = OTHER; note = thymine
  modified_base 289..290: mod_base = OTHER; note = thymine
  modified_base 305: mod_base = OTHER; note = thymine
  modified_base 308: mod_base = OTHER; note = thymine
  modified_base 313: mod_base = OTHER; note = thymine
  modified_base 317: mod_base = OTHER; note = thymine
  modified_base 331: mod_base = OTHER; note = thymine
  modified_base 338: mod_base = OTHER; note = thymine
  modified_base 353: mod_base = OTHER; note = thymine
  modified_base 365: mod_base = OTHER; note = thymine
  modified_base 374: mod_base = OTHER; note = thymine
  modified_base 379: mod_base = OTHER; note = thymine
  modified_base 382: mod_base = OTHER; note = thymine
  modified_base 389: mod_base = OTHER; note = thymine
  modified_base 392: mod_base = OTHER; note = thymine
  modified_base 395: mod_base = OTHER; note = thymine
  modified_base 401: mod_base = OTHER; note = thymine
  modified_base 404: mod_base = OTHER; note = thymine
  modified_base 418: mod_base = OTHER; note = thymine
  modified_base 422: mod_base = OTHER; note = thymine
  modified_base 424: mod_base = OTHER; note = thymine
  modified_base 464: mod_base = OTHER; note = thymine
  modified_base 473: mod_base = OTHER; note = thymine
  modified_base 476: mod_base = OTHER; note = thymine
  modified_base 485: mod_base = OTHER; note = thymine
  modified_base 506: mod_base = OTHER; note = thymine
  modified_base 520..521: mod_base = OTHER; note = thymine
  modified_base 539: mod_base = OTHER; note = thymine
  modified_base 545: mod_base = OTHER; note = thymine
  modified_base 553..554: mod_base = OTHER; note = thymine
  modified_base 565: mod_base = OTHER; note = thymine
  modified_base 575: mod_base = OTHER; note = thymine
  modified_base 589: mod_base = OTHER; note = thymine
  modified_base 595: mod_base = OTHER; note = thymine
  modified_base 598: mod_base = OTHER; note = thymine
  modified_base 607..608: mod_base = OTHER; note = thymine
  modified_base 610: mod_base = OTHER; note = thymine
  modified_base 623: mod_base = OTHER; note = thymine
  modified_base 635: mod_base = OTHER; note = thymine
  modified_base 638: mod_base = OTHER; note = thymine
  modified_base 641: mod_base = OTHER; note = thymine
  modified_base 644: mod_base = OTHER; note = thymine
  modified_base 646..647: mod_base = OTHER; note = thymine
  modified_base 664..665: mod_base = OTHER; note = thymine
  modified_base 680: mod_base = OTHER; note = thymine
  modified_base 682: mod_base = OTHER; note = thymine
  modified_base 692: mod_base = OTHER; note = thymine
  modified_base 704: mod_base = OTHER; note = thymine
  modified_base 713: mod_base = OTHER; note = thymine
  modified_base 716: mod_base = OTHER; note = thymine
  modified_base 719: mod_base = OTHER; note = thymine
  modified_base 737: mod_base = OTHER; note = thymine
  modified_base 739: mod_base = OTHER; note = thymine
  modified_base 752: mod_base = OTHER; note = thymine
  modified_base 761: mod_base = OTHER; note = thymine
  modified_base 764: mod_base = OTHER; note = thymine
  modified_base 772: mod_base = OTHER; note = thymine
  modified_base 778..779: mod_base = OTHER; note = thymine
  modified_base 814: mod_base = OTHER; note = thymine
  modified_base 829..830: mod_base = OTHER; note = thymine
  modified_base 833: mod_base = OTHER; note = thymine
  modified_base 835: mod_base = OTHER; note = thymine
  modified_base 839: mod_base = OTHER; note = thymine
  modified_base 848: mod_base = OTHER; note = thymine
  modified_base 857: mod_base = OTHER; note = thymine
  modified_base 863: mod_base = OTHER; note = thymine
  modified_base 866: mod_base = OTHER; note = thymine
  modified_base 877: mod_base = OTHER; note = thymine
  modified_base 890: mod_base = OTHER; note = thymine
  modified_base 914: mod_base = OTHER; note = thymine
  modified_base 917: mod_base = OTHER; note = thymine
  modified_base 928: mod_base = OTHER; note = thymine
  modified_base 937: mod_base = OTHER; note = thymine
  modified_base 944: mod_base = OTHER; note = thymine
  modified_base 949: mod_base = OTHER; note = thymine
  modified_base 968: mod_base = OTHER; note = thymine
  modified_base 971: mod_base = OTHER; note = thymine
  modified_base 977: mod_base = OTHER; note = thymine
  modified_base 991..992: mod_base = OTHER; note = thymine
  modified_base 994..995: mod_base = OTHER; note = thymine
  modified_base 1004: mod_base = OTHER; note = thymine
  modified_base 1009: mod_base = OTHER; note = thymine
  modified_base 1033: mod_base = OTHER; note = thymine
  modified_base 1040: mod_base = OTHER; note = thymine
  modified_base 1043: mod_base = OTHER; note = thymine
  modified_base 1049: mod_base = OTHER; note = thymine
  modified_base 1057: mod_base = OTHER; note = thymine
  modified_base 1067: mod_base = OTHER; note = thymine
  modified_base 1069: mod_base = OTHER; note = thymine
  modified_base 1079: mod_base = OTHER; note = thymine
  modified_base 1094: mod_base = OTHER; note = thymine
  modified_base 1108: mod_base = OTHER; note = thymine
  modified_base 1115: mod_base = OTHER; note = thymine
  modified_base 1121: mod_base = OTHER; note = thymine
  modified_base 1123: mod_base = OTHER; note = thymine
  modified_base 1133: mod_base = OTHER; note = thymine
  modified_base 1145: mod_base = OTHER; note = thymine
  modified_base 1156..1157: mod_base = OTHER; note = thymine
  modified_base 1159: mod_base = OTHER; note = thymine
  modified_base 1163: mod_base = OTHER; note = thymine
  modified_base 1165..1166: mod_base = OTHER; note = thymine
  modified_base 1184: mod_base = OTHER; note = thymine
  modified_base 1196: mod_base = OTHER; note = thymine
  modified_base 1208: mod_base = OTHER; note = thymine
  modified_base 1220: mod_base = OTHER; note = thymine
  modified_base 1223: mod_base = OTHER; note = thymine
  modified_base 1232: mod_base = OTHER; note = thymine
  modified_base 1235: mod_base = OTHER; note = thymine
  modified_base 1244: mod_base = OTHER; note = thymine
  modified_base 1246: mod_base = OTHER; note = thymine
  modified_base 1249..1250: mod_base = OTHER; note = thymine
  modified_base 1258..1259: mod_base = OTHER; note = thymine
  modified_base 1262: mod_base = OTHER; note = thymine
  modified_base 1268: mod_base = OTHER; note = thymine
  modified_base 1270: mod_base = OTHER; note = thymine
  modified_base 1274: mod_base = OTHER; note = thymine
  modified_base 1283: mod_base = OTHER; note = thymine
  modified_base 1292: mod_base = OTHER; note = thymine
  modified_base 1295: mod_base = OTHER; note = thymine
  modified_base 1301: mod_base = OTHER; note = thymine
  modified_base 1304: mod_base = OTHER; note = thymine
  modified_base 1321: mod_base = OTHER; note = thymine
  modified_base 1333: mod_base = OTHER; note = thymine
  modified_base 1343: mod_base = OTHER; note = thymine
  modified_base 1345: mod_base = OTHER; note = thymine
  modified_base 1357: mod_base = OTHER; note = thymine
  modified_base 1385: mod_base = OTHER; note = thymine
  modified_base 1387: mod_base = OTHER; note = thymine
  modified_base 1391: mod_base = OTHER; note = thymine
  modified_base 1400: mod_base = OTHER; note = thymine
  modified_base 1415: mod_base = OTHER; note = thymine
  modified_base 1427: mod_base = OTHER; note = thymine
  modified_base 1430: mod_base = OTHER; note = thymine
  modified_base 1433: mod_base = OTHER; note = thymine
  modified_base 1442: mod_base = OTHER; note = thymine
  modified_base 1444: mod_base = OTHER; note = thymine
  modified_base 1460: mod_base = OTHER; note = thymine
  modified_base 1463: mod_base = OTHER; note = thymine
  modified_base 1472: mod_base = OTHER; note = thymine
  modified_base 1475: mod_base = OTHER; note = thymine
  modified_base 1483: mod_base = OTHER; note = thymine
  modified_base 1489: mod_base = OTHER; note = thymine
  modified_base 1502: mod_base = OTHER; note = thymine
  modified_base 1508: mod_base = OTHER; note = thymine
  modified_base 1526: mod_base = OTHER; note = thymine
  modified_base 1534: mod_base = OTHER; note = thymine
  modified_base 1537..1538: mod_base = OTHER; note = thymine
  modified_base 1556: mod_base = OTHER; note = thymine
  modified_base 1609..1610: mod_base = OTHER; note = thymine
  modified_base 1618: mod_base = OTHER; note = thymine
  modified_base 1621..1622: mod_base = OTHER; note = thymine
  modified_base 1630..1631: mod_base = OTHER; note = thymine
  modified_base 1634: mod_base = OTHER; note = thymine
  modified_base 1648: mod_base = OTHER; note = thymine
  modified_base 1658: mod_base = OTHER; note = thymine
  modified_base 1661: mod_base = OTHER; note = thymine
  modified_base 1667: mod_base = OTHER; note = thymine
  modified_base 1673: mod_base = OTHER; note = thymine
  modified_base 1675: mod_base = OTHER; note = thymine
  modified_base 1696: mod_base = OTHER; note = thymine
  modified_base 1700: mod_base = OTHER; note = thymine
  modified_base 1702: mod_base = OTHER; note = thymine
  modified_base 1705: mod_base = OTHER; note = thymine
  modified_base 1718: mod_base = OTHER; note = thymine
  modified_base 1724: mod_base = OTHER; note = thymine
  modified_base 1733: mod_base = OTHER; note = thymine
  modified_base 1747: mod_base = OTHER; note = thymine
  modified_base 1751: mod_base = OTHER; note = thymine
  modified_base 1757: mod_base = OTHER; note = thymine
  modified_base 1769: mod_base = OTHER; note = thymine
  modified_base 1774..1775: mod_base = OTHER; note = thymine
  modified_base 1777: mod_base = OTHER; note = thymine
  modified_base 1786: mod_base = OTHER; note = thymine
  modified_base 1795: mod_base = OTHER; note = thymine
  modified_base 1798..1799: mod_base = OTHER; note = thymine
  modified_base 1811: mod_base = OTHER; note = thymine
  modified_base 1814: mod_base = OTHER; note = thymine
  modified_base 1817: mod_base = OTHER; note = thymine
  modified_base 1820: mod_base = OTHER; note = thymine
  modified_base 1825: mod_base = OTHER; note = thymine
  modified_base 1858: mod_base = OTHER; note = thymine
  modified_base 1864: mod_base = OTHER; note = thymine
  modified_base 1867..1868: mod_base = OTHER; note = thymine
  modified_base 1885: mod_base = OTHER; note = thymine
  modified_base 1894: mod_base = OTHER; note = thymine
  modified_base 1903..1904: mod_base = OTHER; note = thymine
  modified_base 1916: mod_base = OTHER; note = thymine
  modified_base 1924: mod_base = OTHER; note = thymine
  modified_base 1930..1931: mod_base = OTHER; note = thymine
  modified_base 1939: mod_base = OTHER; note = thymine
  modified_base 1955: mod_base = OTHER; note = thymine
  modified_base 1958: mod_base = OTHER; note = thymine
  modified_base 1961: mod_base = OTHER; note = thymine
  modified_base 1969..1970: mod_base = OTHER; note = thymine
  modified_base 1984..1985: mod_base = OTHER; note = thymine
  modified_base 2000: mod_base = OTHER; note = thymine
  modified_base 2014: mod_base = OTHER; note = thymine
  modified_base 2018: mod_base = OTHER; note = thymine
  modified_base 2026..2027: mod_base = OTHER; note = thymine
  modified_base 2030: mod_base = OTHER; note = thymine
  modified_base 2032: mod_base = OTHER; note = thymine
  modified_base 2038..2039: mod_base = OTHER; note = thymine
  modified_base 2042: mod_base = OTHER; note = thymine
  modified_base 2054: mod_base = OTHER; note = thymine
  modified_base 2060: mod_base = OTHER; note = thymine
  modified_base 2084: mod_base = OTHER; note = thymine
  modified_base 2086..2087: mod_base = OTHER; note = thymine
  modified_base 2092: mod_base = OTHER; note = thymine
  modified_base 2105: mod_base = OTHER; note = thymine
  modified_base 2114: mod_base = OTHER; note = thymine
  modified_base 2117: mod_base = OTHER; note = thymine
  modified_base 2125..2126: mod_base = OTHER; note = thymine
  modified_base 2128: mod_base = OTHER; note = thymine
  modified_base 2135: mod_base = OTHER; note = thymine
  modified_base 2144: mod_base = OTHER; note = thymine
  modified_base 2174: mod_base = OTHER; note = thymine
  modified_base 2183: mod_base = OTHER; note = thymine
  modified_base 2186: mod_base = OTHER; note = thymine
  modified_base 2189: mod_base = OTHER; note = thymine
  modified_base 2194: mod_base = OTHER; note = thymine
  modified_base 2197: mod_base = OTHER; note = thymine
  modified_base 2204: mod_base = OTHER; note = thymine
  modified_base 2210: mod_base = OTHER; note = thymine
  modified_base 2222: mod_base = OTHER; note = thymine
  modified_base 2230..2231: mod_base = OTHER; note = thymine
  modified_base 2234: mod_base = OTHER; note = thymine
  modified_base 2239: mod_base = OTHER; note = thymine
  modified_base 2249: mod_base = OTHER; note = thymine
  modified_base 2257..2258: mod_base = OTHER; note = thymine
  modified_base 2273: mod_base = OTHER; note = thymine
  modified_base 2294: mod_base = OTHER; note = thymine
  modified_base 2297: mod_base = OTHER; note = thymine
  modified_base 2314..2315: mod_base = OTHER; note = thymine
  modified_base 2326: mod_base = OTHER; note = thymine
  modified_base 2332..2333: mod_base = OTHER; note = thymine
  modified_base 2335..2336: mod_base = OTHER; note = thymine
  modified_base 2348: mod_base = OTHER; note = thymine
  modified_base 2351: mod_base = OTHER; note = thymine
  modified_base 2354: mod_base = OTHER; note = thymine
  modified_base 2360: mod_base = OTHER; note = thymine
  modified_base 2362..2363: mod_base = OTHER; note = thymine
  modified_base 2389..2390: mod_base = OTHER; note = thymine
  modified_base 2408: mod_base = OTHER; note = thymine
  modified_base 2417: mod_base = OTHER; note = thymine
  modified_base 2426: mod_base = OTHER; note = thymine
  modified_base 2429: mod_base = OTHER; note = thymine
  modified_base 2441: mod_base = OTHER; note = thymine
  modified_base 2443: mod_base = OTHER; note = thymine
  modified_base 2446: mod_base = OTHER; note = thymine
  modified_base 2462: mod_base = OTHER; note = thymine
  modified_base 2470: mod_base = OTHER; note = thymine
  modified_base 2474: mod_base = OTHER; note = thymine
  modified_base 2483: mod_base = OTHER; note = thymine
  modified_base 2485..2486: mod_base = OTHER; note = thymine
  modified_base 2489: mod_base = OTHER; note = thymine
  modified_base 2491: mod_base = OTHER; note = thymine
  modified_base 2513: mod_base = OTHER; note = thymine
  modified_base 2515: mod_base = OTHER; note = thymine
  modified_base 2531: mod_base = OTHER; note = thymine
  modified_base 2540: mod_base = OTHER; note = thymine
  modified_base 2545: mod_base = OTHER; note = thymine
  modified_base 2558: mod_base = OTHER; note = thymine
  modified_base 2570: mod_base = OTHER; note = thymine
  modified_base 2572: mod_base = OTHER; note = thymine
  modified_base 2576: mod_base = OTHER; note = thymine
  modified_base 2579: mod_base = OTHER; note = thymine
  modified_base 2585: mod_base = OTHER; note = thymine
  modified_base 2591: mod_base = OTHER; note = thymine
  modified_base 2600: mod_base = OTHER; note = thymine
  modified_base 2606: mod_base = OTHER; note = thymine
  modified_base 2615: mod_base = OTHER; note = thymine
  modified_base 2624: mod_base = OTHER; note = thymine
  modified_base 2627: mod_base = OTHER; note = thymine
  modified_base 2651: mod_base = OTHER; note = thymine
  modified_base 2653: mod_base = OTHER; note = thymine
  modified_base 2663: mod_base = OTHER; note = thymine
  modified_base 2675: mod_base = OTHER; note = thymine
  modified_base 2707..2708: mod_base = OTHER; note = thymine
  modified_base 2719..2720: mod_base = OTHER; note = thymine
  modified_base 2722: mod_base = OTHER; note = thymine
  modified_base 2728: mod_base = OTHER; note = thymine
  modified_base 2759: mod_base = OTHER; note = thymine
  modified_base 2768: mod_base = OTHER; note = thymine
  modified_base 2774: mod_base = OTHER; note = thymine
  modified_base 2783: mod_base = OTHER; note = thymine
  modified_base 2798: mod_base = OTHER; note = thymine
  modified_base 2800: mod_base = OTHER; note = thymine
  modified_base 2804: mod_base = OTHER; note = thymine
  modified_base 2822: mod_base = OTHER; note = thymine
  modified_base 2840: mod_base = OTHER; note = thymine
  modified_base 2843: mod_base = OTHER; note = thymine
  modified_base 2849: mod_base = OTHER; note = thymine
  modified_base 2855: mod_base = OTHER; note = thymine
  modified_base 2857..2858: mod_base = OTHER; note = thymine
  modified_base 2875: mod_base = OTHER; note = thymine
  modified_base 2878: mod_base = OTHER; note = thymine
  modified_base 2882: mod_base = OTHER; note = thymine
  modified_base 2885: mod_base = OTHER; note = thymine
  modified_base 2891: mod_base = OTHER; note = thymine
  modified_base 2893: mod_base = OTHER; note = thymine
  modified_base 2896: mod_base = OTHER; note = thymine
  modified_base 2899: mod_base = OTHER; note = thymine
  modified_base 2906: mod_base = OTHER; note = thymine
  modified_base 2918: mod_base = OTHER; note = thymine
  modified_base 2921: mod_base = OTHER; note = thymine
  modified_base 2936: mod_base = OTHER; note = thymine
  modified_base 2939: mod_base = OTHER; note = thymine
  modified_base 2962: mod_base = OTHER; note = thymine
  modified_base 2969: mod_base = OTHER; note = thymine
  modified_base 2972: mod_base = OTHER; note = thymine
  modified_base 2980: mod_base = OTHER; note = thymine
  modified_base 2983..2984: mod_base = OTHER; note = thymine
  modified_base 2989..2990: mod_base = OTHER; note = thymine
  modified_base 2995..2996: mod_base = OTHER; note = thymine
  modified_base 2998: mod_base = OTHER; note = thymine
  modified_base 3002: mod_base = OTHER; note = thymine
  modified_base 3017: mod_base = OTHER; note = thymine
  modified_base 3020: mod_base = OTHER; note = thymine
  modified_base 3026: mod_base = OTHER; note = thymine
  modified_base 3029: mod_base = OTHER; note = thymine
  modified_base 3047: mod_base = OTHER; note = thymine
  modified_base 3049..3050: mod_base = OTHER; note = thymine
  modified_base 3055: mod_base = OTHER; note = thymine
  modified_base 3058..3059: mod_base = OTHER; note = thymine
  modified_base 3064: mod_base = OTHER; note = thymine
  modified_base 3067: mod_base = OTHER; note = thymine
  modified_base 3089: mod_base = OTHER; note = thymine
  modified_base 3095: mod_base = OTHER; note = thymine
  modified_base 3101: mod_base = OTHER; note = thymine
  modified_base 3110: mod_base = OTHER; note = thymine
  modified_base 3122: mod_base = OTHER; note = thymine
  modified_base 3137: mod_base = OTHER; note = thymine
  modified_base 3140: mod_base = OTHER; note = thymine
  modified_base 3149: mod_base = OTHER; note = thymine
  modified_base 3155: mod_base = OTHER; note = thymine
  modified_base 3167: mod_base = OTHER; note = thymine
  modified_base 3169: mod_base = OTHER; note = thymine
  modified_base 3172..3173: mod_base = OTHER; note = thymine
  modified_base 3181: mod_base = OTHER; note = thymine
  modified_base 3188: mod_base = OTHER; note = thymine
  modified_base 3197: mod_base = OTHER; note = thymine
  modified_base 3209: mod_base = OTHER; note = thymine
  modified_base 3217: mod_base = OTHER; note = thymine
  modified_base 3224: mod_base = OTHER; note = thymine
  modified_base 3242: mod_base = OTHER; note = thymine
  misc_feature 1..3249: note = Synthetic
  source 1..3249: mol_type = other RNA
atggccgccttcaagcccaactccatcaactacatcctgggcctggccatcggcatcgcctccgtgggctgggccatggtggagatcgacgaggaggagaaccccatccggctgatcgacctgggcgtgcgggtgttcgagcgggccgaggtgcccaagaccggcgactccctggccatggcccggcggctggcccggtccgtgcggcggctgacccggcggcgggcccaccggctgctgcggacccggcggctgctgaagcgggagggcgtgctgcaggccgccaacttcgacgagaacggcctgatcaagtccctgcccaacaccccctggcagctgcgggccgccgccctggaccggaagctgacccccctggagtggtccgccgtgctgctgcacctgatcaagcaccggggctacctgtcccagcggaagaacgagggcgagaccgccgacaaggagctgggcgccctgctgaagggcgtggccggcaacgcccacgccctgcagaccggcgacttccggacccccgccgagctggccctgaacaagttcgagaaggagtccggccacatccggaaccagcggtccgactactcccacaccttctcccggaaggacctgcaggccgagctgatcctgctgttcgagaagcagaaggagttcggcaacccccacgtgtccggcggcctgaaggagggcatcgagaccctgctgatgacccagcggcccgccctgtccggcgacgccgtgcagaagatgctgggccactgcaccttcgagcccgccgagcccaaggccgccaagaacacctacaccgccgagcggttcatctggctgaccaagctgaacaacctgcggatcctggagcagggctccgagcggcccctgaccgacaccgagcgggccaccctgatggacgagccctaccggaagtccaagctgacctacgcccaggcccggaagctgctgggcctggaggacaccgccttcttcaagggcctgcggtacggcaaggacaacgccgaggcctccaccctgatggagatgaaggcctaccacgccatctcccgggccctggagaaggagggcctgaaggacaagaagtcccccctgaacctgtcccccgagctgcaggacgagatcggcaccgccttctccctgttcaagaccgacgaggacatcaccggccggctgaaggaccggatccagcccgagatcctggaggccctgctgaagcacatctccttcgacaagttcgtgcagatctccctgaaggccctgcggcggatcgtgcccctgatggagcagggcaagcggtacgacgaggcctgcgccgagatctacggcgaccactacggcaagaagaacaccgaggagaagatctacctgccccccatccccgccgacgagatccggaaccccgtggtgctgcgggccctgtcccaggcccggaaggtgatcaacggcgtggtgcggcggtacggctcccccgcccggatccacatcgagaccgcccgggaggtgggcaagtccttcaaggaccggaaggagatcgagaagcggcaggaggagaaccggaaggaccgggagaaggccgccgccaagttccgggagtacttccccaacttcgtgggcgagcccaagtccaaggacatcctgaagctgcggctgtacgagcagcagcacggcaagtgcctgtactccggcaaggagatcaacctgggccggctgaacgagaagggctacgtggagatcgaccacgccctgcccttctcccggacctgggacgactccttcaacaacaaggtgctggtgctgggctccgagaaccagaacaagggcaaccagaccccctacgagtacttcaacggcaaggacaactcccgggagtggcaggagttcaaggcccgggtggagacctcccggttcccccggtccaagaagcagcggatcctgctgcagaagttcgacgaggacggcttcaaggagcggaacctgaacgacacccggtacgtgaaccggttcctgtgccagttcgtggccgaccggatgcggctgaccggcaagggcaagaagcgggtgttcgcctccaacggccagatcaccaacctgctgcggggcttctggggcctgcggaaggtgcgggccgagaacgaccggcaccacgccctggacgccgtggtggtggcctgctccaccgtggccatgcagcagaagatcacccggttcgtgcggtacaaggagatgaacgccttcgacggcaagaccatcgacaaggagaccggcgaggtgctgcaccagaagacccacttcccccagccctgggagttcttcgcccaggaggtgatgatccgggtgttcggcaagcccgacggcaagcccgagttcgaggaggccgacaccctggagaagctgcggaccctgctggccgagaagctgtcctcccggcccgaggccgtgcacgagtacgtgacccccctgttcgtgtcccgggcccccaaccggaagatgtccggccagggccacatggagaccgtgaagtccgccaagcggctggacgagggcgtgtccgtgctgcgggtgcccctgacccagctgaagctgaaggacctggagaagatggtgaaccgggagcgggagcccaagctgtacgaggccctgaaggcccggctggaggcccacaaggacgaccccgccaaggccttcgccgagcccttctacaagtacgacaaggccggcaaccggacccagcaggtgaaggccgtgcgggtggagcaggtgcagaagaccggcgtgtgggtgcggaaccacaacggcatcgccgacaacgccaccatggtgcgggtggacgtgttcgagaagggcgacaagtactacctggtgcccatctactcctggcaggtggccaagggcatcctgcccgaccgggccgtggtgcagggcaaggacgaggaggactggcagctgatcgacgactccttcaacttcaagttctccctgcaccccaacgacctggtggaggtgatcaccaagaaggcccggatgttcggctacttcgcctcctgccaccggggcaccggcaacatcaacatccggatccacgacctggaccacaagatcggcaagaacggcatcctggagggcatcggcgtgaagaccgccctgtccttccagaagtaccagatcgacgagctgggcaaggagatccggccctgccggctgaagaagcggccccccgtgcggtga

SEQ ID NO: 240 - RNA, 3249 nt, synthetic construct
  modified_base 2: mod_base = OTHER; note = thymine
  modified_base 10..11: mod_base = OTHER; note = thymine
  modified_base 22: mod_base = OTHER; note = thymine
  modified_base 26: mod_base = OTHER; note = thymine
  modified_base 31: mod_base = OTHER; note = thymine
  modified_base 35: mod_base = OTHER; note = thymine
  modified_base 38: mod_base = OTHER; note = thymine
  modified_base 44: mod_base = OTHER; note = thymine
  modified_base 50: mod_base = OTHER; note = thymine
  modified_base 56: mod_base = OTHER; note = thymine
  modified_base 61: mod_base = OTHER; note = thymine
  modified_base 65: mod_base = OTHER; note = thymine
  modified_base 70: mod_base = OTHER; note = thymine
  modified_base 77: mod_base = OTHER; note = thymine
  modified_base 80: mod_base = OTHER; note = thymine
  modified_base 86: mod_base = OTHER; note = thymine
  modified_base 107: mod_base = OTHER; note = thymine
  modified_base 113: mod_base = OTHER; note = thymine
  modified_base 116: mod_base = OTHER; note = thymine
  modified_base 122: mod_base = OTHER; note = thymine
  modified_base 128: mod_base = OTHER; note = thymine
  modified_base 134: mod_base = OTHER; note = thymine
  modified_base 136..137: mod_base = OTHER; note = thymine
  modified_base 152: mod_base = OTHER; note = thymine
  modified_base 169: mod_base = OTHER; note = thymine
  modified_base 173: mod_base = OTHER; note = thymine
  modified_base 179: mod_base = OTHER; note = thymine
  modified_base 191: mod_base = OTHER; note = thymine
  modified_base 199: mod_base = OTHER; note = thymine
  modified_base 203: mod_base = OTHER; note = thymine
  modified_base 212: mod_base = OTHER; note = thymine
  modified_base 236: mod_base = OTHER; note = thymine
  modified_base 239: mod_base = OTHER; note = thymine
  modified_base 254: mod_base = OTHER; note = thymine
  modified_base 257: mod_base = OTHER; note = thymine
  modified_base 272: mod_base = OTHER; note = thymine
  modified_base 275: mod_base = OTHER; note = thymine
  modified_base 289..290: mod_base = OTHER; note = thymine
  modified_base 305: mod_base = OTHER; note = thymine
  modified_base 308: mod_base = OTHER; note = thymine
  modified_base 313: mod_base = OTHER; note = thymine
  modified_base 317: mod_base = OTHER; note = thymine
  modified_base 331: mod_base = OTHER; note = thymine
  modified_base 338: mod_base = OTHER; note = thymine
  modified_base 353: mod_base = OTHER; note = thymine
  modified_base 365: mod_base = OTHER; note = thymine
  modified_base 374: mod_base = OTHER; note = thymine
  modified_base 379: mod_base = OTHER; note = thymine
  modified_base 382: mod_base = OTHER; note = thymine
  modified_base 389: mod_base = OTHER; note = thymine
  modified_base 392: mod_base = OTHER; note = thymine
  modified_base 395: mod_base = OTHER; note = thymine
  modified_base 401: mod_base = OTHER; note = thymine
  modified_base 404: mod_base = OTHER; note = thymine
  modified_base 418: mod_base = OTHER; note = thymine
  modified_base 422: mod_base = OTHER; note = thymine
  modified_base 424: mod_base = OTHER; note = thymine
  modified_base 464: mod_base = OTHER; note = thymine
  modified_base 473: mod_base = OTHER; note = thymine
  modified_base 476: mod_base = OTHER; note = thymine
  modified_base 485: mod_base = OTHER; note = thymine
  modified_base 506: mod_base = OTHER; note = thymine
  modified_base 520..521: mod_base = OTHER; note = thymine
  modified_base 539: mod_base = OTHER; note = thymine
  modified_base 545: mod_base = OTHER; note = thymine
  modified_base 553..554: mod_base = OTHER; note = thymine
  modified_base 565: mod_base = OTHER; note = thymine
  modified_base 575: mod_base = OTHER; note = thymine
  modified_base 589: mod_base = OTHER; note = thymine
  modified_base 595: mod_base = OTHER; note = thymine
  modified_base 598: mod_base = OTHER; note = thymine
  modified_base 607..608: mod_base = OTHER; note = thymine
  modified_base 610: mod_base = OTHER; note = thymine
  modified_base 623: mod_base = OTHER; note = thymine
  modified_base 635: mod_base = OTHER; note = thymine
  modified_base 638: mod_base = OTHER; note = thymine
  modified_base 641: mod_base = OTHER; note = thymine
  modified_base 644: mod_base = OTHER; note = thymine
  modified_base 646..647: mod_base = OTHER; note = thymine
  modified_base 664..665: mod_base = OTHER; note = thymine
  modified_base 680: mod_base = OTHER; note = thymine
  modified_base 682: mod_base = OTHER; note = thymine
  modified_base 692: mod_base = OTHER; note = thymine
  modified_base 704: mod_base = OTHER; note = thymine
  modified_base 713: mod_base = OTHER; note = thymine
  modified_base 716: mod_base = OTHER; note = thymine
  modified_base 719: mod_base = OTHER; note = thymine
  modified_base 737: mod_base = OTHER; note = thymine
  modified_base 739: mod_base = OTHER; note = thymine
  modified_base 752: mod_base = OTHER; note = thymine
  modified_base 761: mod_base = OTHER; note = thymine
  modified_base 764: mod_base = OTHER; note = thymine
  modified_base 772: mod_base = OTHER; note = thymine
  modified_base 778..779: mod_base = OTHER; note = thymine
  modified_base 814: mod_base = OTHER; note = thymine
  modified_base 829..830: mod_base = OTHER; note = thymine
  modified_base 833: mod_base = OTHER; note = thymine
  modified_base 835: mod_base = OTHER; note = thymine
  modified_base 839: mod_base = OTHER; note = thymine
  modified_base 848: mod_base = OTHER; note = thymine
  modified_base 857: mod_base = OTHER; note = thymine
  modified_base 863: mod_base = OTHER; note = thymine
  modified_base 866: mod_base = OTHER; note = thymine
  modified_base 877: mod_base = OTHER; note = thymine
  modified_base 890: mod_base = OTHER; note = thymine
  modified_base 914: mod_base = OTHER; note = thymine
  modified_base 917: mod_base = OTHER; note = thymine
  modified_base 928: mod_base = OTHER; note = thymine
  modified_base 937: mod_base = OTHER; note = thymine
  modified_base 944: mod_base = OTHER; note = thymine
  modified_base 949: mod_base = OTHER; note = thymine
  modified_base 968: mod_base = OTHER; note = thymine
  modified_base 971: mod_base = OTHER; note = thymine
  modified_base 977: mod_base = OTHER; note = thymine
  modified_base 991..992: mod_base = OTHER; note = thymine
  modified_base 994..995: mod_base = OTHER; note = thymine
  modified_base 1004: mod_base = OTHER; note = thymine
  modified_base 1009: mod_base = OTHER; note = thymine
  modified_base 1033: mod_base = OTHER; note = thymine
  modified_base 1040: mod_base = OTHER; note = thymine
  modified_base 1043: mod_base = OTHER; note = thymine
  modified_base 1049: mod_base = OTHER; note = thymine
  modified_base 1057: mod_base = OTHER; note = thymine
  modified_base 1067: mod_base = OTHER; note = thymine
  modified_base 1069: mod_base = OTHER; note = thymine
  modified_base 1079: mod_base = OTHER; note = thymine
  modified_base 1094: mod_base = OTHER; note = thymine
  modified_base 1108: mod_base = OTHER; note = thymine
  modified_base 1115: mod_base = OTHER; note = thymine
  modified_base 1121: mod_base = OTHER; note = thymine
  modified_base 1123: mod_base = OTHER; note = thymine
  modified_base 1133: mod_base = OTHER; note = thymine
  modified_base 1145: mod_base = OTHER; note = thymine
  modified_base 1156..1157: mod_base = OTHER; note = thymine
  modified_base 1159: mod_base = OTHER; note = thymine
  modified_base 1163: mod_base = OTHER; note = thymine
  modified_base 1165..1166: mod_base = OTHER; note = thymine
  modified_base 1184: mod_base = OTHER; note = thymine
  modified_base 1196: mod_base = OTHER; note = thymine
  modified_base 1208: mod_base = OTHER; note = thymine
  modified_base 1220: mod_base = OTHER; note = thymine
  modified_base 1223: mod_base = OTHER; note = thymine
  modified_base 1232: mod_base = OTHER; note = thymine
  modified_base 1235: mod_base = OTHER; note = thymine
  modified_base 1244: mod_base = OTHER; note = thymine
  modified_base 1246: mod_base = OTHER; note = thymine
  modified_base 1249..1250: mod_base = OTHER; note = thymine
  modified_base 1258..1259: mod_base = OTHER; note = thymine
  modified_base 1262: mod_base = OTHER; note = thymine
  modified_base 1268: mod_base = OTHER; note = thymine
  modified_base 1270: mod_base = OTHER; note = thymine
  modified_base 1274: mod_base = OTHER; note = thymine
  modified_base 1283: mod_base = OTHER; note = thymine
  modified_base 1292: mod_base = OTHER; note = thymine
  modified_base 1295: mod_base = OTHER; note = thymine
  modified_base 1301: mod_base = OTHER; note = thymine
  modified_base 1304: mod_base = OTHER; note = thymine
  modified_base 1321: mod_base = OTHER; note = thymine
  modified_base 1333: mod_base = OTHER; note = thymine
  modified_base 1343: mod_base = OTHER; note = thymine
  modified_base 1345: mod_base = OTHER; note = thymine
  modified_base 1357: mod_base = OTHER; note = thymine
  modified_base 1385: mod_base = OTHER; note = thymine
  modified_base 1387: mod_base = OTHER; note = thymine
  modified_base 1391: mod_base = OTHER; note = thymine
  modified_base 1400: mod_base = OTHER; note = thymine
  modified_base 1415: mod_base = OTHER; note = thymine
  modified_base 1427: mod_base = OTHER; note = thymine
  modified_base 1430: mod_base = OTHER; note = thymine
  modified_base 1433: mod_base = OTHER; note = thymine
  modified_base 1442: mod_base = OTHER; note = thymine
  modified_base 1444: mod_base = OTHER; note = thymine
  modified_base 1460: mod_base = OTHER; note = thymine
  modified_base 1463: mod_base = OTHER; note = thymine
  modified_base 1472: mod_base = OTHER; note = thymine
  modified_base 1475: mod_base = OTHER; note = thymine
  modified_base 1483: mod_base = OTHER; note = thymine
  modified_base 1489: mod_base = OTHER; note = thymine
  modified_base 1502: mod_base = OTHER; note = thymine
  modified_base 1508: mod_base = OTHER; note = thymine
  modified_base 1526: mod_base = OTHER; note = thymine
  modified_base 1534: mod_base = OTHER; note = thymine
  modified_base 1537..1538: mod_base = OTHER; note = thymine
  modified_base 1556: mod_base = OTHER; note = thymine
  modified_base 1609..1610: mod_base = OTHER; note = thymine
  modified_base 1618: mod_base = OTHER; note = thymine
  modified_base 1621..1622: mod_base = OTHER; note = thymine
  modified_base 1630..1631: mod_base = OTHER; note = thymine
  modified_base 1634: mod_base = OTHER; note = thymine
  modified_base 1648: mod_base = OTHER; note = thymine
  modified_base 1658: mod_base = OTHER; note = thymine
  modified_base 1661: mod_base = OTHER; note = thymine
  modified_base 1667: mod_base = OTHER; note = thymine
  modified_base 1673: mod_base = OTHER; note = thymine
  modified_base 1675: mod_base = OTHER; note = thymine
  modified_base 1696: mod_base = OTHER; note = thymine
  modified_base 1700: mod_base = OTHER; note = thymine
  modified_base 1702: mod_base = OTHER; note = thymine
  modified_base 1705: mod_base = OTHER; note = thymine
  modified_base 1718: mod_base = OTHER; note = thymine
  modified_base 1724: mod_base = OTHER; note = thymine
  modified_base 1733: mod_base = OTHER; note = thymine
  modified_base 1747: mod_base = OTHER; note = thymine
  modified_base 1751: mod_base = OTHER; note = thymine
  modified_base 1757: mod_base = OTHER; note = thymine
  modified_base 1769: mod_base = OTHER; note = thymine
  modified_base 1774..1775: mod_base = OTHER; note = thymine
  modified_base 1777: mod_base = OTHER; note = thymine
  modified_base 1786: mod_base = OTHER; note = thymine
  modified_base 1795: mod_base = OTHER; note = thymine
  modified_base 1798..1799: mod_base = OTHER; note = thymine
  modified_base 1811: mod_base = OTHER; note = thymine
  modified_base 1814: mod_base = OTHER; note = thymine
  modified_base 1817: mod_base = OTHER; note = thymine
  modified_base 1820: mod_base = OTHER; note = thymine
  modified_base 1825: mod_base = OTHER; note = thymine
  modified_base 1858: mod_base = OTHER; note = thymine
  modified_base 1864: mod_base = OTHER; note = thymine
  modified_base 1867..1868: mod_base = OTHER; note = thymine
  modified_base 1885: mod_base = OTHER; note = thymine
  modified_base 1894: mod_base = OTHER; note = thymine
  modified_base 1903..1904: mod_base = OTHER; note = thymine
  modified_base 1916: mod_base = OTHER; note = thymine
  modified_base 1924: mod_base = OTHER; note = thymine
  modified_base 1930..1931: mod_base = OTHER; note = thymine
  modified_base 1939: mod_base = OTHER; note = thymine
  modified_base 1955: mod_base = OTHER; note = thymine
  modified_base 1958: mod_base = OTHER; note = thymine
  modified_base 1961: mod_base = OTHER; note = thymine
  modified_base 1969..1970: mod_base = OTHER; note = thymine
  modified_base 1984..1985: mod_base = OTHER; note = thymine
  modified_base 2000: mod_base = OTHER; note = thymine
  modified_base 2014: mod_base = OTHER; note = thymine
  modified_base 2018: mod_base = OTHER; note = thymine
  modified_base 2026..2027: mod_base = OTHER; note = thymine
  modified_base 2030: mod_base = OTHER; note = thymine
  modified_base 2032: mod_base = OTHER; note = thymine
  modified_base 2038..2039: mod_base = OTHER; note = thymine
  modified_base 2042: mod_base = OTHER; note = thymine
  modified_base 2054: mod_base = OTHER; note = thymine
  modified_base 2060: mod_base = OTHER; note = thymine
  modified_base 2084: mod_base = OTHER; note = thymine
  modified_base 2086..2087: mod_base = OTHER; note = thymine
  modified_base 2092: mod_base = OTHER; note = thymine
  modified_base 2105: mod_base = OTHER; note = thymine
  modified_base 2114: mod_base = OTHER; note = thymine
  modified_base 2117: mod_base = OTHER; note = thymine
  modified_base 2125..2126: mod_base = OTHER; note = thymine
  modified_base 2128: mod_base = OTHER; note = thymine
  modified_base 2135: mod_base = OTHER; note = thymine
  modified_base 2144: mod_base = OTHER; note = thymine
  modified_base 2174: mod_base = OTHER; note = thymine
  modified_base 2183: mod_base = OTHER; note = thymine
  modified_base 2186: mod_base = OTHER; note = thymine
  modified_base 2189: mod_base = OTHER; note = thymine
  modified_base 2194: mod_base = OTHER; note = thymine
  modified_base 2197: mod_base = OTHER; note = thymine
  modified_base 2204: mod_base = OTHER; note = thymine
  modified_base 2210: mod_base = OTHER; note = thymine
  modified_base 2222: mod_base = OTHER; note = thymine
  modified_base 2230..2231: mod_base = OTHER; note = thymine
  modified_base 2234: mod_base = OTHER; note = thymine
  modified_base 2239: mod_base = OTHER; note = thymine
  modified_base 2249: mod_base = OTHER; note = thymine
  modified_base 2257..2258: mod_base = OTHER; note = thymine
  modified_base 2273: mod_base = OTHER; note = thymine
  modified_base 2294: mod_base = OTHER; note = thymine
  modified_base 2297: mod_base = OTHER; note = thymine
  modified_base 2314..2315: mod_base = OTHER; note = thymine
  modified_base 2326: mod_base = OTHER; note = thymine
  modified_base 2332..2333: mod_base = OTHER; note = thymine
  modified_base 2335..2336: mod_base = OTHER; note = thymine
  modified_base 2348: mod_base = OTHER; note = thymine
  modified_base 2351: mod_base = OTHER; note = thymine
  modified_base 2354: mod_base = OTHER; note = thymine
  modified_base 2360: mod_base = OTHER; note = thymine
  modified_base 2362..2363: mod_base = OTHER; note = thymine
  modified_base 2389..2390: mod_base = OTHER; note = thymine
  modified_base 2408: mod_base = OTHER; note = thymine
  modified_base 2417: mod_base = OTHER; note = thymine
  modified_base 2426: mod_base = OTHER; note = thymine
  modified_base 2429: mod_base = OTHER; note = thymine
  modified_base 2441: mod_base = OTHER; note = thymine
  modified_base 2443: mod_base = OTHER; note = thymine
  modified_base 2446: mod_base = OTHER; note = thymine
  modified_base 2462: mod_base = OTHER; note = thymine
  modified_base 2470: mod_base = OTHER; note = thymine
  modified_base 2474: mod_base = OTHER; note = thymine
  modified_base 2483: mod_base = OTHER; note = thymine
  modified_base 2485..2486: mod_base = OTHER; note = thymine
  modified_base 2489: mod_base = OTHER; note = thymine
  modified_base 2491: mod_base = OTHER; note = thymine
  modified_base 2513: mod_base = OTHER; note = thymine
  modified_base 2515: mod_base = OTHER; note = thymine
  modified_base 2531: mod_base = OTHER; note = thymine
  modified_base 2540: mod_base = OTHER; note = thymine
  modified_base 2545: mod_base = OTHER; note = thymine
  modified_base 2558: mod_base = OTHER; note = thymine
  modified_base 2570: mod_base = OTHER; note = thymine
  modified_base 2572: mod_base = OTHER; note = thymine
  modified_base 2576: mod_base = OTHER; note = thymine
  modified_base 2579: mod_base = OTHER; note = thymine
  modified_base 2585: mod_base = OTHER; note = thymine
  modified_base 2591: mod_base = OTHER; note = thymine
  modified_base 2600: mod_base = OTHER; note = thymine
  modified_base 2606: mod_base = OTHER; note = thymine
  modified_base 2615: mod_base = OTHER; note = thymine
  modified_base 2624: mod_base = OTHER; note = thymine
  modified_base 2627: mod_base = OTHER; note = thymine
  modified_base 2651: mod_base = OTHER; note = thymine
  modified_base 2653: mod_base = OTHER; note = thymine
  modified_base 2663: mod_base = OTHER; note = thymine
  modified_base 2675: mod_base = OTHER; note = thymine
  modified_base 2707..2708: mod_base = OTHER; note = thymine
  modified_base 2719..2720: mod_base = OTHER; note = thymine
  modified_base 2722: mod_base = OTHER; note = thymine
  modified_base 2728: mod_base = OTHER; note = thymine
  modified_base 2759: mod_base = OTHER; note = thymine
  modified_base 2768: mod_base = OTHER; note = thymine
  modified_base 2774: mod_base = OTHER; note = thymine
  modified_base 2783: mod_base = OTHER; note = thymine
  modified_base 2798: mod_base = OTHER; note = thymine
  modified_base 2800: mod_base = OTHER; note = thymine
  modified_base 2804: mod_base = OTHER; note = thymine
  modified_base 2822: mod_base = OTHER; note = thymine
  modified_base 2840: mod_base = OTHER; note = thymine
  modified_base 2843: mod_base = OTHER; note = thymine
  modified_base 2849: mod_base = OTHER; note = thymine
  modified_base 2855: mod_base = OTHER; note = thymine
  modified_base 2857..2858: mod_base = OTHER; note = thymine
  modified_base 2875: mod_base = OTHER; note = thymine
  modified_base 2878: mod_base = OTHER; note = thymine
  modified_base 2882: mod_base = OTHER; note = thymine
  modified_base 2885: mod_base = OTHER; note = thymine
  modified_base 2891: mod_base = OTHER; note = thymine
  modified_base 2893: mod_base = OTHER; note = thymine
  modified_base 2896: mod_base = OTHER; note = thymine
  modified_base 2899: mod_base = OTHER; note = thymine
  modified_base 2906: mod_base = OTHER; note = thymine
  modified_base 2918: mod_base = OTHER; note = thymine
  modified_base 2921: mod_base = OTHER; note = thymine
  modified_base 2936: mod_base = OTHER; note = thymine
  modified_base 2939: mod_base = OTHER; note = thymine
  modified_base 2962: mod_base = OTHER; note = thymine
  modified_base 2969: mod_base = OTHER; note = thymine
  modified_base 2972: mod_base = OTHER; note = thymine
  modified_base 2980: mod_base = OTHER; note = thymine
  modified_base 2983..2984: mod_base = OTHER; note = thymine
  modified_base 2989..2990: mod_base = OTHER; note = thymine
  modified_base 2995..2996: mod_base = OTHER; note = thymine
  modified_base 2998: mod_base = OTHER; note = thymine
  modified_base 3002: mod_base = OTHER; note = thymine
  modified_base 3017: mod_base = OTHER; note = thymine
  modified_base 3020: mod_base = OTHER; note = thymine
  modified_base 3026: mod_base = OTHER; note = thymine
  modified_base 3029: mod_base = OTHER; note = thymine
  modified_base 3047: mod_base = OTHER; note = thymine
  modified_base 3049..3050: mod_base = OTHER; note = thymine
  modified_base 3055: mod_base = OTHER; note = thymine
  modified_base 3058..3059: mod_base = OTHER; note = thymine
  modified_base 3064: mod_base = OTHER; note = thymine
  modified_base 3067: mod_base = OTHER; note = thymine
  modified_base 3089: mod_base = OTHER; note = thymine
  modified_base 3095: mod_base = OTHER; note = thymine
  modified_base 3101: mod_base = OTHER; note = thymine
  modified_base 3110: mod_base = OTHER; note = thymine
  modified_base 3122: mod_base = OTHER; note = thymine
  modified_base 3137: mod_base = OTHER; note = thymine
  modified_base 3140: mod_base = OTHER; note = thymine
  modified_base 3149: mod_base = OTHER; note = thymine
  modified_base 3155: mod_base = OTHER; note = thymine
  modified_base 3167: mod_base = OTHER; note = thymine
  modified_base 3169: mod_base = OTHER; note = thymine
  modified_base 3172..3173: mod_base = OTHER; note = thymine
  modified_base 3181: mod_base = OTHER; note = thymine
  modified_base 3188: mod_base = OTHER; note = thymine
  modified_base 3197: mod_base = OTHER; note = thymine
  modified_base 3209: mod_base = OTHER; note = thymine
  modified_base 3217: mod_base = OTHER; note = thymine
  modified_base 3224: mod_base = OTHER; note = thymine
  modified_base 3242: mod_base = OTHER; note = thymine
  misc_feature 1..3249: note = Synthetic
  source 1..3249: mol_type = other RNA
atggcagcattcaaaccaaactcaatcaactacatcctaggactagcaatcggaatcgcatcagtaggatgagcaatggtagaaatcgacgaagaagaaaacccaatccgactaatcgacctaggagtacgagtattcgaacgagcagaagtaccaaaaacaggagactcactagcaatggcacgacgactagcacgatcagtacgacgactaacacgacgacgagcacaccgactactacgaacacgacgactactaaaacgagaaggagtactacaagcagcaaacttcgacgaaaacggactaatcaaatcactaccaaacacaccatgacaactacgagcagcagcactagaccgaaaactaacaccactagaatgatcagcagtactactacacctaatcaaacaccgaggatacctatcacaacgaaaaaacgaaggagaaacagcagacaaagaactaggagcactactaaaaggagtagcaggaaacgcacacgcactacaaacaggagacttccgaacaccagcagaactagcactaaacaaattcgaaaaagaatcaggacacatccgaaaccaacgatcagactactcacacacattctcacgaaaagacctacaagcagaactaatcctactattcgaaaaacaaaaagaattcggaaacccacacgtatcaggaggactaaaagaaggaatcgaaacactactaatgacacaacgaccagcactatcaggagacgcagtacaaaaaatgctaggacactgcacattcgaaccagcagaaccaaaagcagcaaaaaacacatacacagcagaacgattcatctgactaacaaaactaaacaacctacgaatcctagaacaaggatcagaacgaccactaacagacacagaacgagcaacactaatggacgaaccataccgaaaatcaaaactaacatacgcacaagcacgaaaactactaggactagaagacacagcattcttcaaaggactacgatacggaaaagacaacgcagaagcatcaacactaatggaaatgaaagcataccacgcaatctcacgagcactagaaaaagaaggactaaaagacaaaaaatcaccactaaacctatcaccagaactacaagacgaaatcggaacagcattctcactattcaaaacagacgaagacatcacaggacgactaaaagaccgaatccaaccagaaatcctagaagcactactaaaacacatctcattcgacaaattcgtacaaatctcactaaaagcactacgacgaatcgtaccactaatggaacaaggaaaacgatacgacgaagcatgcgcagaaatctacggagaccactacggaaaaaaaaacacagaagaaaaaatctacctaccaccaatcccagcagacgaaatccgaaacccagtagtactacgagcactatcacaagcacgaaaagtaatcaacggagtagtacgacgatacggatcaccagcacgaatccacatcgaaacagcacgagaagtaggaaaatcattcaaagaccgaaaagaaatcgaaaaacgacaagaagaaaaccgaaaagaccgagaaaaagcagcagcaaaattccgagaatacttcccaaacttcgtaggagaaccaaaatcaaaagacatcctaaaactacgactatacgaacaacaacacggaaaatgcctatactcaggaaaagaaatcaacctaggacgactaaacgaaaaaggatacgtagaaatcgaccacgcactaccattctcacgaacatgagacgactcattcaacaacaaagtactagtactaggatcagaaaaccaaaacaaaggaaaccaaacaccatacgaatacttcaacggaaaagacaactcacgagaatgacaagaattcaaagcacgagtagaaacatcacgattcccacgatcaaaaaaacaacgaatcctactacaaaaattcgacgaagacggattcaaagaacgaaacctaaacgacacacgatacgtaaaccgattcctatgccaattcgtagcagaccgaatgcgactaacaggaaaaggaaaaaaacgagtattcgcatcaaacggacaaatcacaaacctactacgaggattctgaggactacgaaaagtacgagcagaaaacgaccgacaccacgcactagacgcagtagtagtagcatgctcaacagtagcaatgcaacaaaaaatcacacgattcgtacgatacaaagaaatgaacgcattcgacggaaaaacaatcgacaaagaaacaggagaagtactacaccaaaaaacacacttcccacaaccatgagaattcttcgcacaagaagtaatgatccgagtattcggaaaaccagacggaaaaccagaattcgaagaagcagacacactagaaaaactacgaacactactagcagaaaaactatcatcacgaccagaagcagtacacgaatacgtaacaccactattcgtatcacgagcaccaaaccgaaaaatgtcaggacaaggacacatggaaacagtaaaatcagcaaaacgactagacgaaggagtatcagtactacgagtaccactaacacaactaaaactaaaagacctagaaaaaatggtaaaccgagaacgagaaccaaaactatacgaagcactaaaagcacgactagaagcacacaaagacgacccagcaaaagcattcgcagaaccattctacaaatacgacaaagcaggaaaccgaacacaacaagtaaaagcagtacgagtagaacaagtacaaaaaacaggagtatgagtacgaaaccacaacggaatcgcagacaacgcaacaatggtacgagtagacgtattcgaaaaaggagacaaatactacctagtaccaatctactcatgacaagtagcaaaaggaatcctaccagaccgagcagtagtacaaggaaaagacgaagaagactgacaactaatcgacgactcattcaacttcaaattctcactacacccaaacgacctagtagaagtaatcacaaaaaaagcacgaatgttcggatacttcgcatcatgccaccgaggaacaggaaacatcaacatccgaatccacgacctagaccacaaaatcggaaaaaacggaatcctagaaggaatcggagtaaaaacagcactatcattccaaaaataccaaatcgacgaactaggaaaagaaatccgaccatgccgactaaaaaaacgaccaccagtacgataa

SEQ ID NO: 241 - protein, 1082 aa, synthetic construct
  REGION 1..1082: note = Synthetic
MAAFKPNSINYILGLDIGIASVGWAMVEIDEEENPIRLIDLGVRVFERAEVPKTGDSLAMARRLARSVRRLTRRRAHRLLRTRRLLKREGVLQAANFDENGLIKSLPNTPWQLRAAALDRKLTPLEWSAVLLHLIKHRGYLSQRKNEGETADKELGALLKGVAGNAHALQTGDFRTPAELALNKFEKESGHIRNQRSDYSHTFSRKDLQAELILLFEKQKEFGNPHVSGGLKEGIETLLMTQRPALSGDAVQKMLGHCTFEPAEPKAAKNTYTAERFIWLTKLNNLRILEQGSERPLTDTERATLMDEPYRKSKLTYAQARKLLGLEDTAFFKGLRYGKDNAEASTLMEMKAYHAISRALEKEGLKDKKSPLNLSPELQDEIGTAFSLFKTDEDITGRLKDRIQPEILEALLKHISFDKFVQISLKALRRIVPLMEQGKRYDEACAEIYGDHYGKKNTEEKIYLPPIPADEIRNPVVLRALSQARKVINGVVRRYGSPARIHIETAREVGKSFKDRKEIEKRQEENRKDREKAAAKFREYFPNFVGEPKSKDILKLRLYEQQHGKCLYSGKEINLGRLNEKGYVEIDAALPFSRTWDDSFNNKVLVLGSENQNKGNQTPYEYFNGKDNSREWQEFKARVETSRFPRSKKQRILLQKFDEDGFKERNLNDTRYVNRFLCQFVADRMRLTGKGKKRVFASNGQITNLLRGFWGLRKVRAENDRHHALDAVVVACSTVAMQQKITRFVRYKEMNAFDGKTIDKETGEVLHQKTHFPQPWEFFAQEVMIRVFGKPDGKPEFEEADTLEKLRTLLAEKLSSRPEAVHEYVTPLFVSRAPNRKMSGQGHMETVKSAKRLDEGVSVLRVPLTQLKLKDLEKMVNREREPKLYEALKARLEAHKDDPAKAFAEPFYKYDKAGNRTQQVKAVRVEQVQKTGVWVRNHNGIADNATMVRVDVFEKGDKYYLVPIYSWQVAKGILPDRAVVQGKDEEDWQLIDDSFNFKFSLHPNDLVEVITKKARMFGYFASCHRGTGNINIRIHDLDHKIGKNGILEGIGVKTALSFQKYQIDELGKEIRPCRLKKRPPVR

SEQ ID NO: 242 - DNA, 3243 bp, synthetic construct
  misc_feature 1..3243: note = Synthetic
  source 1..3243: mol_type = other DNA
gctgcttttaagcctaattctattaattatattcttggtcttgatattggtattgcttctgttggttgggctatggttgagattgatgaggaggagaatcctattcgtcttattgatcttggtgttcgtgtttttgagcgtgctgaggttcctaagactggtgattctcttgctatggctcgtcgtcttgctcgttctgttcgtcgtcttactcgtcgtcgtgctcatcgtcttcttcgtactcgtcgtcttcttaagcgtgagggtgttcttcaggctgctaattttgatgagaatggtcttattaagtctcttcctaatactccttggcagcttcgtgctgctgctcttgatcgtaagcttactcctcttgagtggtctgctgttcttcttcatcttattaagcatcgtggttatctttctcagcgtaagaatgagggtgagactgctgataaggagcttggtgctcttcttaagggtgttgctggtaatgctcatgctcttcagactggtgattttcgtactcctgctgagcttgctcttaataagtttgagaaggagtctggtcatattcgtaatcagcgttctgattattctcatactttttctcgtaaggatcttcaggctgagcttattcttctttttgagaagcagaaggagtttggtaatcctcatgtttctggtggtcttaaggagggtattgagactcttcttatgactcagcgtcctgctctttctggtgatgctgttcagaagatgcttggtcattgtacttttgagcctgctgagcctaaggctgctaagaatacttatactgctgagcgttttatttggcttactaagcttaataatcttcgtattcttgagcagggttctgagcgtcctcttactgatactgagcgtgctactcttatggatgagccttatcgtaagtctaagcttacttatgctcaggctcgtaagcttcttggtcttgaggatactgctttttttaagggtcttcgttatggtaaggataatgctgaggcttctactcttatggagatgaaggcttatcatgctatttctcgtgctcttgagaaggagggtcttaaggataagaagtctcctcttaatctttctcctgagcttcaggatgagattggtactgctttttctctttttaagactgatgaggatattactggtcgtcttaaggatcgtattcagcctgagattcttgaggctcttcttaagcatatttcttttgataagtttgttcagatttctcttaaggctcttcgtcgtattgttcctcttatggagcagggtaagcgttatgatgaggcttgtgctgagatttatggtgatcattatggtaagaagaatactgaggagaagatttatcttcctcctattcctgctgatgagattcgtaatcctgttgttcttcgtgctctttctcaggctcgtaaggttattaatggtgttgttcgtcgttatggttctcctgctcgtattcatattgagactgctcgtgaggttggtaagtcttttaaggatcgtaaggagattgagaagcgtcaggaggagaatcgtaaggatcgtgagaaggctgctgctaagtttcgtgagtattttcctaattttgttggtgagcctaagtctaaggatattcttaagcttcgtctttatgagcagcagcatggtaagtgtctttattctggtaaggagattaatcttggtcgtcttaatgagaagggttatgttgagattgatgctgctcttcctttttctcgtacttgggatgattcttttaataataaggttcttgttcttggttctgagaatcagaataagggtaatcagactccttatgagtattttaatggtaaggataattctcgtgagtggcaggagtttaaggctcgtgttgagacttctcgttttcctcgttctaagaagcagcgtattcttcttcagaagtttgatgaggatggttttaaggagcgtaatcttaatgatactcgttatgttaatcgttttctttgtcagtttgttgctgatcgtatgcgtcttactggtaagggtaagaagcgtgtttttgcttctaatggtcagattactaatcttcttcgtggtttttggggtcttcgtaaggttcgtgctgagaatgatcgtcatcatgctcttgatgctgttgttgttgcttgttctactgttgctatgcagcagaagattactcgttttgttcgttataaggagatgaatgcttttgatggtaagactattgataaggagactggtgaggttcttcatcagaagactcattttcctcagccttgggagttttttgctcaggaggttatgattcgtgtttttggtaagcctgatggtaagcctgagtttgaggaggctgatactcttgagaagcttcgtactcttcttgctgagaagctttcttctcgtcctgaggctgttcatgagtatgttactcctctttttgtttctcgtgctcctaatcgtaagatgtctggtcagggtcatatggagactgttaagtctgctaagcgtcttgatgagggtgtttctgttcttcgtgttcctcttactcagcttaagcttaaggatcttgagaagatggttaatcgtgagcgtgagcctaagctttatgaggctcttaaggctcgtcttgaggctcataaggatgatcctgctaaggcttttgctgagcctttttataagtatgataaggctggtaatcgtactcagcaggttaaggctgttcgtgttgagcaggttcagaagactggtgtttgggttcgtaatcataatggtattgctgataatgctactatggttcgtgttgatgtttttgagaagggtgataagtattatcttgttcctatttattcttggcaggttgctaagggtattcttcctgatcgtgctgttgttcagggtaaggatgaggaggattggcagcttattgatgattcttttaattttaagttttctcttcatcctaatgatcttgttgaggttattactaagaaggctcgtatgtttggttattttgcttcttgtcatcgtggtactggtaatattaatattcgtattcatgatcttgatcataagattggtaagaatggtattcttgagggtattggtgttaagactgctctttcttttcagaagtatcagattgatgagcttggtaaggagattcgtccttgtcgtcttaagaagcgtcctcctgttcgt

SEQ ID NO: 243 - DNA, 3243 bp, synthetic construct
  misc_feature 1..3243: note = Synthetic
  source 1..3243: mol_type = other DNA
gccgccttcaagcccaactccatcaactacatcctgggcctggacatcggcatcgcctccgtgggctgggccatggtggagatcgacgaggaggagaaccccatccggctgatcgacctgggcgtgcgggtgttcgagcgggccgaggtgcccaagaccggcgactccctggccatggcccggcggctggcccggtccgtgcggcggctgacccggcggcgggcccaccggctgctgcggacccggcggctgctgaagcgggagggcgtgctgcaggccgccaacttcgacgagaacggcctgatcaagtccctgcccaacaccccctggcagctgcgggccgccgccctggaccggaagctgacccccctggagtggtccgccgtgctgctgcacctgatcaagcaccggggctacctgtcccagcggaagaacgagggcgagaccgccgacaaggagctgggcgccctgctgaagggcgtggccggcaacgcccacgccctgcagaccggcgacttccggacccccgccgagctggccctgaacaagttcgagaaggagtccggccacatccggaaccagcggtccgactactcccacaccttctcccggaaggacctgcaggccgagctgatcctgctgttcgagaagcagaaggagttcggcaacccccacgtgtccggcggcctgaaggagggcatcgagaccctgctgatgacccagcggcccgccctgtccggcgacgccgtgcagaagatgctgggccactgcaccttcgagcccgccgagcccaaggccgccaagaacacctacaccgccgagcggttcatctggctgaccaagctgaacaacctgcggatcctggagcagggctccgagcggcccctgaccgacaccgagcgggccaccctgatggacgagccctaccggaagtccaagctgacctacgcccaggcccggaagctgctgggcctggaggacaccgccttcttcaagggcctgcggtacggcaaggacaacgccgaggcctccaccctgatggagatgaaggcctaccacgccatctcccgggccctggagaaggagggcctgaaggacaagaagtcccccctgaacctgtcccccgagctgcaggacgagatcggcaccgccttctccctgttcaagaccgacgaggacatcaccggccggctgaaggaccggatccagcccgagatcctggaggccctgctgaagcacatctccttcgacaagttcgtgcagatctccctgaaggccctgcggcggatcgtgcccctgatggagcagggcaagcggtacgacgaggcctgcgccgagatctacggcgaccactacggcaagaagaacaccgaggagaagatctacctgccccccatccccgccgacgagatccggaaccccgtggtgctgcgggccctgtcccaggcccggaaggtgatcaacggcgtggtgcggcggtacggctcccccgcccggatccacatcgagaccgcccgggaggtgggcaagtccttcaaggaccggaaggagatcgagaagcggcaggaggagaaccggaaggaccgggagaaggccgccgccaagttccgggagtacttccccaacttcgtgggcgagcccaagtccaaggacatcctgaagctgcggctgtacgagcagcagcacggcaagtgcctgtactccggcaaggagatcaacctgggccggctgaacgagaagggctacgtggagatcgacgccgccctgcccttctcccggacctgggacgactccttcaacaacaaggtgctggtgctgggctccgagaaccagaacaagggcaaccagaccccctacgagtacttcaacggcaaggacaactcccgggagtggcaggagttcaaggcccgggtggagacctcccggttcccccggtccaagaagcagcggatcctgctgcagaagttcgacgaggacggcttcaaggagcggaacctgaacgacacccggtacgtgaaccggttcctgtgccagttcgtggccgaccggatgcggctgaccggcaagggcaagaagcgggtgttcgcctccaacggccagatcaccaacctgctgcggggcttctggggcctgcggaaggtgcgggccgagaacgaccggcaccacgccctggacgccgtggtggtggcctgctccaccgtggccatgcagcagaagatcacccggttcgtgcggtacaaggagatgaacgccttcgacggcaagaccatcgacaaggagaccggcgaggtgctgcaccagaagacccacttcccccagccctgggagttcttcgcccaggaggtgatgatccgggtgttcggcaagcccgacggcaagcccgagttcgaggaggccgacaccctggagaagctgcggaccctgctggccgagaagctgtcctcccggcccgaggccgtgcacgagtacgtgacccccctgttcgtgtcccgggcccccaaccggaagatgtccggccagggccacatggagaccgtgaagtccgccaagcggctggacgagggcgtgtccgtgctgcgggtgcccctgacccagctgaagctgaaggacctggagaagatggtgaaccgggagcgggagcccaagctgtacgaggccctgaaggcccggctggaggcccacaaggacgaccccgccaaggccttcgccgagcccttctacaagtacgacaaggccggcaaccggacccagcaggtgaaggccgtgcgggtggagcaggtgcagaagaccggcgtgtgggtgcggaaccacaacggcatcgccgacaacgccaccatggtgcgggtggacgtgttcgagaagggcgacaagtactacctggtgcccatctactcctggcaggtggccaagggcatcctgcccgaccgggccgtggtgcagggcaaggacgaggaggactggcagctgatcgacgactccttcaacttcaagttctccctgcaccccaacgacctggtggaggtgatcaccaagaaggcccggatgttcggctacttcgcctcctgccaccggggcaccggcaacatcaacatccggatccacgacctggaccacaagatcggcaagaacggcatcctggagggcatcggcgtgaagaccgccctgtccttccagaagtaccagatcgacgagctgggcaaggagatccggccctgccggctgaagaagcggccccccgtgcgg

SEQ ID NO: 244 - DNA, 3243 bp, synthetic construct
  misc_feature 1..3243: note = Synthetic
  source 1..3243: mol_type = other DNA
gcagcattcaaaccaaactcaatcaactacatcctaggactagacatcggaatcgcatcagtaggatgagcaatggtagaaatcgacgaagaagaaaacccaatccgactaatcgacctaggagtacgagtattcgaacgagcagaagtaccaaaaacaggagactcactagcaatggcacgacgactagcacgatcagtacgacgactaacacgacgacgagcacaccgactactacgaacacgacgactactaaaacgagaaggagtactacaagcagcaaacttcgacgaaaacggactaatcaaatcactaccaaacacaccatgacaactacgagcagcagcactagaccgaaaactaacaccactagaatgatcagcagtactactacacctaatcaaacaccgaggatacctatcacaacgaaaaaacgaaggagaaacagcagacaaagaactaggagcactactaaaaggagtagcaggaaacgcacacgcactacaaacaggagacttccgaacaccagcagaactagcactaaacaaattcgaaaaagaatcaggacacatccgaaaccaacgatcagactactcacacacattctcacgaaaagacctacaagcagaactaatcctactattcgaaaaacaaaaagaattcggaaacccacacgtatcaggaggactaaaagaaggaatcgaaacactactaatgacacaacgaccagcactatcaggagacgcagtacaaaaaatgctaggacactgcacattcgaaccagcagaaccaaaagcagcaaaaaacacatacacagcagaacgattcatctgactaacaaaactaaacaacctacgaatcctagaacaaggatcagaacgaccactaacagacacagaacgagcaacactaatggacgaaccataccgaaaatcaaaactaacatacgcacaagcacgaaaactactaggactagaagacacagcattcttcaaaggactacgatacggaaaagacaacgcagaagcatcaacactaatggaaatgaaagcataccacgcaatctcacgagcactagaaaaagaaggactaaaagacaaaaaatcaccactaaacctatcaccagaactacaagacgaaatcggaacagcattctcactattcaaaacagacgaagacatcacaggacgactaaaagaccgaatccaaccagaaatcctagaagcactactaaaacacatctcattcgacaaattcgtacaaatctcactaaaagcactacgacgaatcgtaccactaatggaacaaggaaaacgatacgacgaagcatgcgcagaaatctacggagaccactacggaaaaaaaaacacagaagaaaaaatctacctaccaccaatcccagcagacgaaatccgaaacccagtagtactacgagcactatcacaagcacgaaaagtaatcaacggagtagtacgacgatacggatcaccagcacgaatccacatcgaaacagcacgagaagtaggaaaatcattcaaagaccgaaaagaaatcgaaaaacgacaagaagaaaaccgaaaagaccgagaaaaagcagcagcaaaattccgagaatacttcccaaacttcgtaggagaaccaaaatcaaaagacatcctaaaactacgactatacgaacaacaacacggaaaatgcctatactcaggaaaagaaatcaacctaggacgactaaacgaaaaaggatacgtagaaatcgacgcagcactaccattctcacgaacatgagacgactcattcaacaacaaagtactagtactaggatcagaaaaccaaaacaaaggaaaccaaacaccatacgaatacttcaacggaaaagacaactcacgagaatgacaagaattcaaagcacgagtagaaacatcacgattcccacgatcaaaaaaacaacgaatcctactacaaaaattcgacgaagacggattcaaagaacgaaacctaaacgacacacgatacgtaaaccgattcctatgccaattcgtagcagaccgaatgcgactaacaggaaaaggaaaaaaacgagtattcgcatcaaacggacaaatcacaaacctactacgaggattctgaggactacgaaaagtacgagcagaaaacgaccgacaccacgcactagacgcagtagtagtagcatgctcaacagtagcaatgcaacaaaaaatcacacgattcgtacgatacaaagaaatgaacgcattcgacggaaaaacaatcgacaaagaaacaggagaagtactacaccaaaaaacacacttcccacaaccatgagaattcttcgcacaagaagtaatgatccgagtattcggaaaaccagacggaaaaccagaattcgaagaagcagacacactagaaaaactacgaacactactagcagaaaaactatcatcacgaccagaagcagtacacgaatacgtaacaccactattcgtatcacgagcaccaaaccgaaaaatgtcaggacaaggacacatggaaacagtaaaatcagcaaaacgactagacgaaggagtatcagtactacgagtaccactaacacaactaaaactaaaagacctagaaaaaatggtaaaccgagaacgagaaccaaaactatacgaagcactaaaagcacgactagaagcacacaaagacgacccagcaaaagcattcgcagaaccattctacaaatacgacaaagcaggaaaccgaacacaacaagtaaaagcagtacgagtagaacaagtacaaaaaacaggagtatgagtacgaaaccacaacggaatcgcagacaacgcaacaatggtacgagtagacgtattcgaaaaaggagacaaatactacctagtaccaatctactcatgacaagtagcaaaaggaatcctaccagaccgagcagtagtacaaggaaaagacgaagaagactgacaactaatcgacgactcattcaacttcaaattctcactacacccaaacgacctagtagaagtaatcacaaaaaaagcacgaatgttcggatacttcgcatcatgccaccgaggaacaggaaacatcaacatccgaatccacgacctagaccacaaaatcggaaaaaacggaatcctagaaggaatcggagtaaaaacagcactatcattccaaaaataccaaatcgacgaactaggaaaagaaatccgaccatgccgactaaaaaaacgaccaccagtacga

SEQ ID NO: 245 - RNA, 3249 nt, synthetic construct
  modified_base 2: mod_base = OTHER; note = thymine
  modified_base 6: mod_base = OTHER; note = thymine
  modified_base 9..12: mod_base = OTHER; note = thymine
  modified_base 18: mod_base = OTHER; note = thymine
  modified_base 21..22: mod_base = OTHER; note = thymine
  modified_base 24: mod_base = OTHER; note = thymine
  modified_base 26..27: mod_base = OTHER; note = thymine
  modified_base 30..31: mod_base = OTHER; note = thymine
  modified_base 33: mod_base = OTHER; note = thymine
  modified_base 35..36: mod_base = OTHER; note = thymine
  modified_base 38..39: mod_base = OTHER; note = thymine
  modified_base 42: mod_base = OTHER; note = thymine
  modified_base 44..45: mod_base = OTHER; note = thymine
  modified_base 48: mod_base = OTHER; note = thymine
  modified_base 50..51: mod_base = OTHER; note = thymine
  modified_base 54: mod_base = OTHER; note = thymine
  modified_base 56..57: mod_base = OTHER; note = thymine
  modified_base 60..61: mod_base = OTHER; note = thymine
  modified_base 63: mod_base = OTHER; note = thymine
  modified_base 65..66: mod_base = OTHER; note = thymine
  modified_base 69..70: mod_base = OTHER; note = thymine
  modified_base 75: mod_base = OTHER; note = thymine
  modified_base 77: mod_base = OTHER; note = thymine
  modified_base 80..81: mod_base = OTHER; note = thymine
  modified_base 86..87: mod_base = OTHER; note = thymine
  modified_base 90: mod_base = OTHER; note = thymine
  modified_base 102: mod_base = OTHER; note = thymine
  modified_base 105: mod_base = OTHER; note = thymine
  modified_base 107..108: mod_base = OTHER; note = thymine
  modified_base 111: mod_base = OTHER; note = thymine
  modified_base 113..114: mod_base = OTHER; note = thymine
  modified_base 116..117: mod_base = OTHER; note = thymine
  modified_base 120: mod_base = OTHER; note = thymine
  modified_base 122..123: mod_base = OTHER; note = thymine
  modified_base 126: mod_base = OTHER; note = thymine
  modified_base 128..129: mod_base = OTHER; note = thymine
  modified_base 132: mod_base = OTHER; note = thymine
  modified_base 134..138: mod_base = OTHER; note = thymine
  modified_base 144: mod_base = OTHER; note = thymine
  modified_base 147: mod_base = OTHER; note = thymine
  modified_base 152..153: mod_base = OTHER; note = thymine
  modified_base 156: mod_base = OTHER; note = thymine
  modified_base 162: mod_base = OTHER; note = thymine
  modified_base 165: mod_base = OTHER; note = thymine
  modified_base 168..169: mod_base = OTHER; note = thymine
  modified_base 171: mod_base = OTHER; note = thymine
  modified_base 173..174: mod_base = OTHER; note = thymine
  modified_base 177: mod_base = OTHER; note = thymine
  modified_base 179: mod_base = OTHER; note = thymine
  modified_base 183: mod_base = OTHER; note = thymine
  modified_base 186: mod_base = OTHER; note = thymine
  modified_base 189: mod_base = OTHER; note = thymine
  modified_base 191..192: mod_base = OTHER; note = thymine
  modified_base 195: mod_base = OTHER; note = thymine
  modified_base 198..199: mod_base = OTHER; note = thymine
  modified_base 201: mod_base = OTHER; note = thymine
  modified_base 203..204: mod_base = OTHER; note = thymine
  modified_base 207: mod_base = OTHER; note = thymine
  modified_base 210: mod_base = OTHER; note = thymine
  modified_base 212..213: mod_base = OTHER; note = thymine
  modified_base 216: mod_base = OTHER; note = thymine
  modified_base 219: mod_base = OTHER; note = thymine
  modified_base 222: mod_base = OTHER; note = thymine
  modified_base 225: mod_base = OTHER; note = thymine
  modified_base 228: mod_base = OTHER; note = thymine
  modified_base 231: mod_base = OTHER; note = thymine
  modified_base 234: mod_base = OTHER; note = thymine
  modified_base 236..237: mod_base = OTHER; note = thymine
  modified_base 239..240: mod_base = OTHER; note = thymine
  modified_base 243: mod_base = OTHER; note = thymine
  modified_base 246: mod_base = OTHER; note = thymine
  modified_base 249: mod_base = OTHER; note = thymine
  modified_base 252: mod_base = OTHER; note = thymine
  modified_base 254..255: mod_base = OTHER; note = thymine
  modified_base 257..258: mod_base = OTHER; note = thymine
  modified_base 264: mod_base = OTHER; note = thymine
  modified_base 270: mod_base = OTHER; note = thymine
  modified_base 272..273: mod_base = OTHER; note = thymine
  modified_base 275..276: mod_base = OTHER; note = thymine
  modified_base 282: mod_base = OTHER; note = thymine
  modified_base 285: mod_base = OTHER; note = thymine
  modified_base 288..291: mod_base = OTHER; note = thymine
  modified_base 294: mod_base = OTHER; note = thymine
  modified_base 300: mod_base = OTHER; note = thymine
  modified_base 303: mod_base = OTHER; note = thymine
  modified_base 305..306: mod_base = OTHER; note = thymine
  modified_base 308..309: mod_base = OTHER; note = thymine
  modified_base 313: mod_base = OTHER; note = thymine
  modified_base 315: mod_base = OTHER; note = thymine
  modified_base 317..318: mod_base = OTHER; note = thymine
  modified_base 321: mod_base = OTHER; note = thymine
  modified_base 324: mod_base = OTHER; note = thymine
  modified_base 327: mod_base = OTHER; note = thymine
  modified_base 330..331: mod_base = OTHER; note = thymine
  modified_base 338..339: mod_base = OTHER; note = thymine
  modified_base 342: mod_base = OTHER; note = thymine
  modified_base 345: mod_base = OTHER; note = thymine
  modified_base 348: mod_base = OTHER; note = thymine
  modified_base 351: mod_base = OTHER; note = thymine
  modified_base 353..354: mod_base = OTHER; note = thymine
  modified_base 357: mod_base = OTHER; note = thymine
  modified_base 360: mod_base = OTHER; note = thymine
  modified_base 365..366: mod_base = OTHER; note = thymine
  modified_base 369: mod_base = OTHER; note = thymine
  modified_base 372: mod_base = OTHER; note = thymine
  modified_base 374..375: mod_base = OTHER; note = thymine
  modified_base 379: mod_base = OTHER; note = thymine
  modified_base 382: mod_base = OTHER; note = thymine
  modified_base 384: mod_base = OTHER; note = thymine
  modified_base 387: mod_base = OTHER; note = thymine
  modified_base 389..390: mod_base = OTHER; note = thymine
  modified_base 392..393: mod_base = OTHER; note = thymine
  modified_base 395..396: mod_base = OTHER; note = thymine
  modified_base 399: mod_base = OTHER; note = thymine
  modified_base 401..402: mod_base = OTHER; note = thymine
  modified_base 404..405: mod_base = OTHER; note = thymine
  modified_base 411: mod_base = OTHER; note = thymine
  modified_base 414: mod_base = OTHER; note = thymine
  modified_base 417..418: mod_base = OTHER; note = thymine
  modified_base 420: mod_base = OTHER; note = thymine
  modified_base 422..424: mod_base = OTHER; note = thymine
  modified_base 426: mod_base = OTHER; note = thymine
  modified_base 432: mod_base = OTHER; note = thymine
  modified_base 438: mod_base = OTHER; note = thymine
  modified_base 444: mod_base = OTHER; note = thymine
  modified_base 450: mod_base = OTHER; note = thymine
  modified_base 453: mod_base = OTHER; note = thymine
  modified_base 456: mod_base = OTHER; note = thymine
  modified_base 464..465: mod_base = OTHER; note = thymine
  modified_base 468: mod_base = OTHER; note = thymine
  modified_base 471: mod_base = OTHER; note = thymine
  modified_base 473..474: mod_base = OTHER; note = thymine
  modified_base 476..477: mod_base = OTHER; note = thymine
  modified_base 483: mod_base = OTHER; note = thymine
  modified_base 485..486: mod_base = OTHER; note = thymine
  modified_base 489: mod_base = OTHER; note = thymine
  modified_base 492: mod_base = OTHER; note = thymine
  modified_base 495: mod_base = OTHER; note = thymine
  modified_base 498: mod_base = OTHER; note = thymine
  modified_base 501: mod_base = OTHER; note = thymine
  modified_base 504: mod_base = OTHER; note = thymine
  modified_base 506..507: mod_base = OTHER; note = thymine
  modified_base 513: mod_base = OTHER; note = thymine
  modified_base 516: mod_base = OTHER; note = thymine
  modified_base 519..522: mod_base = OTHER; note = thymine
  modified_base 525: mod_base = OTHER; note = thymine
  modified_base 528: mod_base = OTHER; note = thymine
  modified_base 531: mod_base = OTHER; note = thymine
  modified_base 534: mod_base = OTHER; note = thymine
  modified_base 539..540: mod_base = OTHER; note = thymine
  modified_base 543: mod_base = OTHER; note = thymine
  modified_base 545..546: mod_base = OTHER; note = thymine
  modified_base 549: mod_base = OTHER; note = thymine
  modified_base 553..555: mod_base = OTHER; note = thymine
  modified_base 565: mod_base = OTHER; note = thymine
  modified_base 567: mod_base = OTHER; note = thymine
  modified_base 570: mod_base = OTHER; note = thymine
  modified_base 573: mod_base = OTHER; note = thymine
  modified_base 575..576: mod_base = OTHER; note = thymine
  modified_base 579: mod_base = OTHER; note = thymine
  modified_base 582: mod_base = OTHER; note = thymine
  modified_base 588..589: mod_base = OTHER; note = thymine
  modified_base 591: mod_base = OTHER; note = thymine
  modified_base 594..595: mod_base = OTHER; note = thymine
  modified_base 597..598: mod_base = OTHER; note = thymine
  modified_base 600: mod_base = OTHER; note = thymine
  modified_base 603: mod_base = OTHER; note = thymine
  modified_base 606..610: mod_base = OTHER; note = thymine
  modified_base 612: mod_base = OTHER; note = thymine
  modified_base 615: mod_base = OTHER; note = thymine
  modified_base 621: mod_base = OTHER; note = thymine
  modified_base 623..624: mod_base = OTHER; note = thymine
  modified_base 630: mod_base = OTHER; note = thymine
  modified_base 635..636: mod_base = OTHER; note = thymine
  modified_base 638..639: mod_base = OTHER; note = thymine
  modified_base 641..642: mod_base = OTHER; note = thymine
  modified_base 644..648: mod_base = OTHER; note = thymine
  modified_base 664..666: mod_base = OTHER; note = thymine
  modified_base 669: mod_base = OTHER; note = thymine
  modified_base 672: mod_base = OTHER; note = thymine
  modified_base 675: mod_base = OTHER; note = thymine
  modified_base 678: mod_base = OTHER; note = thymine
  modified_base 680..682: mod_base = OTHER; note = thymine
  modified_base 684: mod_base = OTHER; note = thymine
  modified_base 687: mod_base = OTHER; note = thymine
  modified_base 690: mod_base = OTHER; note = thymine
  modified_base 692..693: mod_base = OTHER; note = thymine
  modified_base 702: mod_base = OTHER; note = thymine
  modified_base 704..705: mod_base = OTHER; note = thymine
  modified_base 711: mod_base = OTHER; note = thymine
  modified_base 713..714: mod_base = OTHER; note = thymine
  modified_base 716..717: mod_base = OTHER; note = thymine
  modified_base 719: mod_base = OTHER; note = thymine
  modified_base 723: mod_base = OTHER; note = thymine
  modified_base 729: mod_base = OTHER; note = thymine
  modified_base 732: mod_base = OTHER; note = thymine
  modified_base 735: mod_base = OTHER; note = thymine
  modified_base 737..739: mod_base = OTHER; note = thymine
  modified_base 741: mod_base = OTHER; note = thymine
  modified_base 744: mod_base = OTHER; note = thymine
  modified_base 747: mod_base = OTHER; note = thymine
  modified_base 750: mod_base = OTHER; note = thymine
  modified_base 752..753: mod_base = OTHER; note = thymine
  modified_base 761: mod_base = OTHER; note = thymine
  modified_base 764..765: mod_base = OTHER; note = thymine
  modified_base 768: mod_base = OTHER; note = thymine
  modified_base 771..772: mod_base = OTHER; note = thymine
  modified_base 774: mod_base = OTHER; note = thymine
  modified_base 777..780: mod_base = OTHER; note = thymine
  modified_base 786: mod_base = OTHER; note = thymine
  modified_base 789: mod_base = OTHER; note = thymine
  modified_base 795: mod_base = OTHER; note = thymine
  modified_base 801: mod_base = OTHER; note = thymine
  modified_base 804: mod_base = OTHER; note = thymine
  modified_base 810: mod_base = OTHER; note = thymine
  modified_base 813..814: mod_base = OTHER; note = thymine
  modified_base 816: mod_base = OTHER; note = thymine
  modified_base 819: mod_base = OTHER; note = thymine
  modified_base 822: mod_base = OTHER; note = thymine
  modified_base 828..831: mod_base = OTHER; note = thymine
  modified_base 833..835: mod_base = OTHER; note = thymine
  modified_base 839..840: mod_base = OTHER; note = thymine
  modified_base 843: mod_base = OTHER; note = thymine
  modified_base 848..849: mod_base = OTHER; note = thymine
  modified_base 852: mod_base = OTHER; note = thymine
  modified_base 855: mod_base = OTHER; note = thymine
  modified_base 857..858: mod_base = OTHER; note = thymine
  modified_base 861: mod_base = OTHER; note = thymine
  modified_base 863..864: mod_base = OTHER; note = thymine
  modified_base 866..867: mod_base = OTHER; note = thymine
  modified_base 876..877: mod_base = OTHER; note = thymine
  modified_base 879: mod_base = OTHER; note = thymine
  modified_base 885: mod_base = OTHER; note = thymine
  modified_base 888: mod_base = OTHER; note = thymine
  modified_base 890..891: mod_base = OTHER; note = thymine
  modified_base 894: mod_base = OTHER; note = thymine
  modified_base 897: mod_base = OTHER; note = thymine
  modified_base 900: mod_base = OTHER; note = thymine
  modified_base 906: mod_base = OTHER; note = thymine
  modified_base 909: mod_base = OTHER; note = thymine
  modified_base 912: mod_base = OTHER; note = thymine
  modified_base 914..915: mod_base = OTHER; note = thymine
  modified_base 917: mod_base = OTHER; note = thymine
  modified_base 921: mod_base = OTHER; note = thymine
  modified_base 927..928: mod_base = OTHER; note = thymine
  modified_base 930: mod_base = OTHER; note = thymine
  modified_base 933: mod_base = OTHER; note = thymine
  modified_base 937: mod_base = OTHER; note = thymine
  modified_base 939: mod_base = OTHER; note = thymine
  modified_base 944..945: mod_base = OTHER; note = thymine
  modified_base 948..949: mod_base = OTHER; note = thymine
  modified_base 951: mod_base = OTHER; note = thymine
  modified_base 954: mod_base = OTHER; note = thymine
  modified_base 960: mod_base = OTHER; note = thymine
  modified_base 963: mod_base = OTHER; note = thymine
  modified_base 968..969: mod_base = OTHER; note = thymine
  modified_base 971..972: mod_base = OTHER; note = thymine
  modified_base 975: mod_base = OTHER; note = thymine
  modified_base 977..978: mod_base = OTHER; note = thymine
  modified_base 984: mod_base = OTHER; note = thymine
  modified_base 987: mod_base = OTHER; note = thymine
  modified_base 990..996: mod_base = OTHER; note = thymine
  modified_base 1002: mod_base = OTHER; note = thymine
  modified_base 1004..1005: mod_base = OTHER; note = thymine
  modified_base 1008..1009: mod_base = OTHER; note = thymine
  modified_base 1011: mod_base = OTHER; note = thymine
  modified_base 1014: mod_base = OTHER; note = thymine
  modified_base 1020: mod_base = OTHER; note = thymine
  modified_base 1023: mod_base = OTHER; note = thymine
  modified_base 1026: mod_base = OTHER; note = thymine
  modified_base 1032..1033: mod_base = OTHER; note = thymine
  modified_base 1035: mod_base = OTHER; note = thymine
  modified_base 1038: mod_base = OTHER; note = thymine
  modified_base 1040..1041: mod_base = OTHER; note = thymine
  modified_base 1043: mod_base = OTHER; note = thymine
  modified_base 1049: mod_base = OTHER; note = thymine
  modified_base 1056..1057: mod_base = OTHER; note = thymine
  modified_base 1059: mod_base = OTHER; note = thymine
  modified_base 1062: mod_base = OTHER; note = thymine
  modified_base 1065: mod_base = OTHER; note = thymine
  modified_base 1067..1069: mod_base = OTHER; note = thymine
  modified_base 1071: mod_base = OTHER; note = thymine
  modified_base 1074: mod_base = OTHER; note = thymine
  modified_base 1077: mod_base = OTHER; note = thymine
  modified_base 1079..1080: mod_base = OTHER; note = thymine
  modified_base 1092: mod_base = OTHER; note = thymine
  modified_base 1094..1095: mod_base = OTHER; note = thymine
  modified_base 1101: mod_base = OTHER; note = thymine
  modified_base 1108: mod_base = OTHER; note = thymine
  modified_base 1110: mod_base = OTHER; note = thymine
  modified_base 1113: mod_base = OTHER; note = thymine
  modified_base 1115..1116: mod_base = OTHER; note = thymine
  modified_base 1119: mod_base = OTHER; note = thymine
  modified_base 1121..1123: mod_base = OTHER; note = thymine
  modified_base 1125: mod_base = OTHER; note = thymine
  modified_base 1128: mod_base = OTHER; note = thymine
  modified_base 1133..1134: mod_base = OTHER; note = thymine
  modified_base 1140: mod_base = OTHER; note = thymine
  modified_base 1145..1146: mod_base = OTHER; note = thymine
  modified_base 1149: mod_base = OTHER; note = thymine
  modified_base 1152: mod_base = OTHER; note = thymine
  modified_base 1155..1159: mod_base = OTHER; note = thymine
  modified_base 1161: mod_base = OTHER; note = thymine
  modified_base 1163..1167: mod_base = OTHER; note = thymine
  modified_base 1173: mod_base = OTHER; note = thymine
  modified_base 1176: mod_base = OTHER; note = thymine
  modified_base 1182: mod_base = OTHER; note = thymine
  modified_base 1184..1185: mod_base = OTHER; note = thymine
  modified_base 1188: mod_base = OTHER; note = thymine
  modified_base 1191: mod_base = OTHER; note = thymine
  modified_base 1194: mod_base = OTHER; note = thymine
  modified_base 1196..1197: mod_base = OTHER; note = thymine
  modified_base 1203: mod_base = OTHER; note = thymine
  modified_base 1206: mod_base = OTHER; note = thymine
  modified_base 1208..1209: mod_base = OTHER; note = thymine
  modified_base 1215: mod_base = OTHER; note = thymine
  modified_base 1220..1221: mod_base = OTHER; note = thymine
  modified_base 1223..1224: mod_base = OTHER; note = thymine
  modified_base 1230: mod_base = OTHER; note = thymine
  modified_base 1232..1233: mod_base = OTHER; note = thymine
  modified_base 1235..1236: mod_base = OTHER; note = thymine
  modified_base 1242: mod_base = OTHER; note = thymine
  modified_base 1244..1246: mod_base = OTHER; note = thymine
  modified_base 1248..1251: mod_base = OTHER; note = thymine
  modified_base 1254: mod_base = OTHER; note = thymine
  modified_base 1258..1260: mod_base = OTHER; note = thymine
  modified_base 1262..1263: mod_base = OTHER; note = thymine
  modified_base 1268..1270: mod_base = OTHER; note = thymine
  modified_base 1272: mod_base = OTHER; note = thymine
  modified_base 1274..1275: mod_base = OTHER; note = thymine
  modified_base 1281: mod_base = OTHER; note = thymine
  modified_base 1283..1284: mod_base = OTHER; note = thymine
  modified_base 1287: mod_base = OTHER; note = thymine
  modified_base 1290: mod_base = OTHER; note = thymine
  modified_base 1292..1293: mod_base = OTHER; note = thymine
  modified_base 1295..1296: mod_base = OTHER; note = thymine
  modified_base 1299: mod_base = OTHER; note = thymine
  modified_base 1301..1302: mod_base = OTHER; note = thymine
  modified_base 1304: mod_base = OTHER; note = thymine
  modified_base 1314: mod_base = OTHER; note = thymine
  modified_base 1320..1321: mod_base = OTHER; note = thymine
  modified_base 1323: mod_base = OTHER; note = thymine
  modified_base 1326: mod_base = OTHER; note = thymine
  modified_base 1332..1333: mod_base = OTHER; note = thymine
  modified_base 1335: mod_base = OTHER; note = thymine
  modified_base 1338: mod_base = OTHER; note = thymine
  modified_base 1343..1345: mod_base = OTHER; note = thymine
  modified_base 1347: mod_base = OTHER; note = thymine
  modified_base 1350: mod_base = OTHER; note = thymine
  modified_base 1353: mod_base = OTHER; note = thymine
  modified_base 1356..1357: mod_base = OTHER; note = thymine
  modified_base 1359: mod_base = OTHER; note = thymine
  modified_base 1362: mod_base = OTHER; note = thymine
  modified_base 1371: mod_base = OTHER; note = thymine
  modified_base 1374: mod_base = OTHER; note = thymine
  modified_base 1385..1387: mod_base = OTHER; note = thymine
  modified_base 1389: mod_base = OTHER; note = thymine
  modified_base 1391..1392: mod_base = OTHER; note = thymine
  modified_base 1395: mod_base = OTHER; note = thymine
  modified_base 1398: mod_base = OTHER; note = thymine
  modified_base 1400..1401: mod_base = OTHER; note = thymine
  modified_base 1404: mod_base = OTHER; note = thymine
  modified_base 1407: mod_base = OTHER; note = thymine
  modified_base 1410: mod_base = OTHER; note = thymine
  modified_base 1415..1416: mod_base = OTHER; note = thymine
  modified_base 1419: mod_base = OTHER; note = thymine
  modified_base 1422: mod_base = OTHER; note = thymine
  modified_base 1425: mod_base = OTHER; note = thymine
  modified_base 1427..1428: mod_base = OTHER; note = thymine
  modified_base 1430..1431: mod_base = OTHER; note = thymine
  modified_base 1433..1434: mod_base = OTHER; note = thymine
  modified_base 1437: mod_base = OTHER; note = thymine
  modified_base 1440: mod_base = OTHER; note = thymine
  modified_base 1442..1444: mod_base = OTHER; note = thymine
  modified_base 1446: mod_base = OTHER; note = thymine
  modified_base 1452: mod_base = OTHER; note = thymine
  modified_base 1455: mod_base = OTHER; note = thymine
  modified_base 1460..1461: mod_base = OTHER; note = thymine
  modified_base 1463..1464: mod_base = OTHER; note = thymine
  modified_base 1467: mod_base = OTHER; note = thymine
  modified_base 1470: mod_base = OTHER; note = thymine
  modified_base 1472..1473: mod_base = OTHER; note = thymine
  modified_base 1475..1476: mod_base = OTHER; note = thymine
  modified_base 1479: mod_base = OTHER; note = thymine
  modified_base 1482..1483: mod_base = OTHER; note = thymine
  modified_base 1485: mod_base = OTHER; note = thymine
  modified_base 1488..1489: mod_base = OTHER; note = thymine
  modified_base 1491: mod_base = OTHER; note = thymine
  modified_base 1494: mod_base = OTHER; note = thymine
  modified_base 1497: mod_base = OTHER; note = thymine
  modified_base 1500: mod_base = OTHER; note = thymine
  modified_base 1502..1503: mod_base = OTHER; note = thymine
  modified_base 1506: mod_base = OTHER; note = thymine
  modified_base 1508..1509: mod_base = OTHER; note = thymine
  modified_base 1515: mod_base = OTHER; note = thymine
  modified_base 1518: mod_base = OTHER; note = thymine
  modified_base 1521: mod_base = OTHER; note = thymine
  modified_base 1526..1527: mod_base = OTHER; note = thymine
  modified_base 1530: mod_base = OTHER; note = thymine
  modified_base 1534: mod_base = OTHER; note = thymine
  modified_base 1536..1539: mod_base = OTHER; note = thymine
  modified_base 1545: mod_base = OTHER; note = thymine
  modified_base 1548: mod_base = OTHER; note = thymine
  modified_base 1556..1557: mod_base = OTHER; note = thymine
  modified_base 1566: mod_base = OTHER; note = thymine
  modified_base 1578: mod_base = OTHER; note = thymine
  modified_base 1581: mod_base = OTHER; note = thymine
  modified_base 1587: mod_base = OTHER; note = thymine
  modified_base 1590: mod_base = OTHER; note = thymine
  modified_base 1599: mod_base = OTHER; note = thymine
  modified_base 1602: mod_base = OTHER; note = thymine
  modified_base 1605: mod_base = OTHER; note = thymine
  modified_base 1609..1611: mod_base = OTHER; note = thymine
  modified_base 1614: mod_base = OTHER; note = thymine
  modified_base 1618: mod_base = OTHER; note = thymine
  modified_base 1620..1623: mod_base = OTHER; note = thymine
  modified_base 1626: mod_base = OTHER; note = thymine
  modified_base 1629..1632: mod_base = OTHER; note = thymine
  modified_base 1634..1635: mod_base = OTHER; note = thymine
  modified_base 1638: mod_base = OTHER; note = thymine
  modified_base 1644: mod_base = OTHER; note = thymine
  modified_base 1648: mod_base = OTHER; note = thymine
  modified_base 1650: mod_base = OTHER; note = thymine
  modified_base 1656: mod_base = OTHER; note = thymine
  modified_base 1658..1659: mod_base = OTHER; note = thymine
  modified_base 1661..1662: mod_base = OTHER; note = thymine
  modified_base 1667..1668: mod_base = OTHER; note = thymine
  modified_base 1671: mod_base = OTHER; note = thymine
  modified_base 1673..1675: mod_base = OTHER; note = thymine
  modified_base 1677: mod_base = OTHER; note = thymine
  modified_base 1689: mod_base = OTHER; note = thymine
  modified_base 1692: mod_base = OTHER; note = thymine
  modified_base 1696: mod_base = OTHER; note = thymine
  modified_base 1698: mod_base = OTHER; note = thymine
  modified_base 1700..1702: mod_base = OTHER; note = thymine
  modified_base 1704..1705: mod_base = OTHER; note = thymine
  modified_base 1707: mod_base = OTHER; note = thymine
  modified_base 1710: mod_base = OTHER; note = thymine
  modified_base 1718..1719: mod_base = OTHER; note = thymine
  modified_base 1722: mod_base = OTHER; note = thymine
  modified_base 1724..1725: mod_base = OTHER; note = thymine
  modified_base 1728: mod_base = OTHER; note = thymine
  modified_base 1731: mod_base = OTHER; note = thymine
  modified_base 1733..1734: mod_base = OTHER; note = thymine
  modified_base 1737: mod_base = OTHER; note = thymine
  modified_base 1746..1747: mod_base = OTHER; note = thymine
  modified_base 1749: mod_base = OTHER; note = thymine
  modified_base 1751..1752: mod_base = OTHER; note = thymine
  modified_base 1757..1758: mod_base = OTHER; note = thymine
  modified_base 1761: mod_base = OTHER; note = thymine
  modified_base 1764: mod_base = OTHER; note = thymine
  modified_base 1767: mod_base = OTHER; note = thymine
  modified_base 1769..1770: mod_base = OTHER; note = thymine
  modified_base 1773..1777: mod_base = OTHER; note = thymine
  modified_base 1779: mod_base = OTHER; note = thymine
  modified_base 1782: mod_base = OTHER; note = thymine
  modified_base 1785..1786: mod_base = OTHER; note = thymine
  modified_base 1791: mod_base = OTHER; note = thymine
  modified_base 1794..1795: mod_base = OTHER; note = thymine
  modified_base 1797..1800: mod_base = OTHER; note = thymine
  modified_base 1803: mod_base = OTHER; note = thymine
  modified_base 1806: mod_base = OTHER; note = thymine
  modified_base 1811..1812: mod_base = OTHER; note = thymine
  modified_base 1814..1815: mod_base = OTHER; note = thymine
  modified_base 1817..1818: mod_base = OTHER; note = thymine
  modified_base 1820..1821: mod_base = OTHER; note = thymine
  modified_base 1824..1825: mod_base = OTHER; note = thymine
  modified_base 1827: mod_base = OTHER; note = thymine
  modified_base 1833: mod_base = OTHER; note = thymine
  modified_base 1839: mod_base = OTHER; note = thymine
  modified_base 1845: mod_base = OTHER; note = thymine
  modified_base 1848: mod_base = OTHER; note = thymine
  modified_base 1854: mod_base = OTHER; note = thymine
  modified_base 1857..1858: mod_base = OTHER; note = thymine
  modified_base 1860: mod_base = OTHER; note = thymine
  modified_base 1864: mod_base = OTHER; note = thymine
  modified_base 1866..1869: mod_base = OTHER; note = thymine
  modified_base 1872: mod_base = OTHER; note = thymine
  modified_base 1875: mod_base = OTHER; note = thymine
  modified_base 1881: mod_base = OTHER; note = thymine
  modified_base 1884..1885: mod_base = OTHER; note = thymine
  modified_base 1887: mod_base = OTHER; note = thymine
  modified_base 1890: mod_base = OTHER; note = thymine
  modified_base 1894: mod_base = OTHER; note = thymine
  modified_base 1903..1905: mod_base = OTHER; note = thymine
  modified_base 1911: mod_base = OTHER; note = thymine
  modified_base 1914: mod_base = OTHER; note = thymine
  modified_base 1916..1917: mod_base = OTHER; note = thymine
  modified_base 1923..1924: mod_base = OTHER; note = thymine
  modified_base 1926: mod_base = OTHER; note = thymine
  modified_base 1929..1932: mod_base = OTHER; note = thymine
  modified_base 1935: mod_base = OTHER; note = thymine
  modified_base 1938..1939: mod_base = OTHER; note = thymine
  modified_base 1941: mod_base = OTHER; note = thymine
  modified_base 1953: mod_base = OTHER; note = thymine
  modified_base 1955..1956: mod_base = OTHER; note = thymine
  modified_base 1958..1959: mod_base = OTHER; note = thymine
  modified_base 1961..1962: mod_base = OTHER; note = thymine
  modified_base 1969..1971: mod_base = OTHER; note = thymine
  modified_base 1974: mod_base = OTHER; note = thymine
  modified_base 1980: mod_base = OTHER; note = thymine
  modified_base 1983..1986: mod_base = OTHER; note = thymine
  modified_base 1995: mod_base = OTHER; note = thymine
  modified_base 1998: mod_base = OTHER; note = thymine
  modified_base 2000..2001: mod_base = OTHER; note = thymine
  modified_base 2004: mod_base = OTHER; note = thymine
  modified_base 2007: mod_base = OTHER; note = thymine
  modified_base 2010: mod_base = OTHER; note = thymine
  modified_base 2013..2014: mod_base = OTHER; note = thymine
  modified_base 2016: mod_base = OTHER; note = thymine
  modified_base 2018..2019: mod_base = OTHER; note = thymine
  modified_base 2022: mod_base = OTHER; note = thymine
  modified_base 2025..2028: mod_base = OTHER; note = thymine
  modified_base 2030..2032: mod_base = OTHER; note = thymine
  modified_base 2034: mod_base = OTHER; note = thymine
  modified_base 2038..2040: mod_base = OTHER; note = thymine
  modified_base 2042..2043: mod_base = OTHER; note = thymine
  modified_base 2046: mod_base = OTHER; note = thymine
  modified_base 2049: mod_base = OTHER; note = thymine
  modified_base 2052: mod_base = OTHER; note = thymine
  modified_base 2054: mod_base = OTHER; note = thymine
  modified_base 2058: mod_base = OTHER; note = thymine
  modified_base 2060..2061: mod_base = OTHER; note = thymine
  modified_base 2064: mod_base = OTHER; note = thymine
  modified_base 2067: mod_base = OTHER; note = thymine
  modified_base 2073: mod_base = OTHER; note = thymine
  modified_base 2082: mod_base = OTHER; note = thymine
  modified_base 2084..2088: mod_base = OTHER; note = thymine
  modified_base 2091..2092: mod_base = OTHER; note = thymine
  modified_base 2094: mod_base = OTHER; note = thymine
  modified_base 2097: mod_base = OTHER; note = thymine
  modified_base 2100: mod_base = OTHER; note = thymine
  modified_base 2105..2106: mod_base = OTHER; note = thymine
  modified_base 2109: mod_base = OTHER; note = thymine
  modified_base 2112: mod_base = OTHER; note = thymine
  modified_base 2114..2115: mod_base = OTHER; note = thymine
  modified_base 2117..2118: mod_base = OTHER; note = thymine
  modified_base 2121: mod_base = OTHER; note = thymine
  modified_base 2124..2128: mod_base = OTHER; note = thymine
  modified_base 2133: mod_base = OTHER; note = thymine
  modified_base 2135..2136: mod_base = OTHER; note = thymine
  modified_base 2139: mod_base = OTHER; note = thymine
  modified_base 2144..2145: mod_base = OTHER; note = thymine
  modified_base 2148: mod_base = OTHER; note = thymine
  modified_base 2151: mod_base = OTHER; note = thymine
  modified_base 2157: mod_base = OTHER; note = thymine
  modified_base 2160: mod_base = OTHER; note = thymine
  modified_base 2163: mod_base = OTHER; note = thymine
  modified_base 2166: mod_base = OTHER; note = thymine
  modified_base 2169: mod_base = OTHER; note = thymine
  modified_base 2172: mod_base = OTHER; note = thymine
  modified_base 2174..2175: mod_base = OTHER; note = thymine
  modified_base 2178: mod_base = OTHER; note = thymine
  modified_base 2181: mod_base = OTHER; note = thymine
  modified_base 2183..2184: mod_base = OTHER; note = thymine
  modified_base 2186..2187: mod_base = OTHER; note = thymine
  modified_base 2189..2190: mod_base = OTHER; note = thymine
  modified_base 2193..2194: mod_base = OTHER; note = thymine
  modified_base 2196..2197: mod_base = OTHER; note = thymine
  modified_base 2199: mod_base = OTHER; note = thymine
  modified_base 2202: mod_base = OTHER; note = thymine
  modified_base 2204..2205: mod_base = OTHER; note = thymine
  modified_base 2208: mod_base = OTHER; note = thymine
  modified_base 2210: mod_base = OTHER; note = thymine
  modified_base 2222..2223: mod_base = OTHER; note = thymine
  modified_base 2226: mod_base = OTHER; note = thymine
  modified_base 2229..2232: mod_base = OTHER; note = thymine
  modified_base 2234..2235: mod_base = OTHER; note = thymine
  modified_base 2238..2239: mod_base = OTHER; note = thymine
  modified_base 2241: mod_base = OTHER; note = thymine
  modified_base 2249: mod_base = OTHER; note = thymine
  modified_base 2253: mod_base = OTHER; note = thymine
  modified_base 2256..2259: mod_base = OTHER; note = thymine
  modified_base 2262: mod_base = OTHER; note = thymine
  modified_base 2265: mod_base = OTHER; note = thymine
  modified_base 2271: mod_base = OTHER; note = thymine
  modified_base 2273..2274: mod_base = OTHER; note = thymine
  modified_base 2277: mod_base = OTHER; note = thymine
  modified_base 2286: mod_base = OTHER; note = thymine
  modified_base 2289: mod_base = OTHER; note = thymine
  modified_base 2294..2295: mod_base = OTHER; note = thymine
  modified_base 2297..2298: mod_base = OTHER; note = thymine
  modified_base 2301: mod_base = OTHER; note = thymine
  modified_base 2310: mod_base = OTHER; note = thymine
  modified_base 2313..2316: mod_base = OTHER; note = thymine
  modified_base 2319: mod_base = OTHER; note = thymine
  modified_base 2325..2326: mod_base = OTHER; note = thymine
  modified_base 2332..2337: mod_base = OTHER; note = thymine
  modified_base 2340: mod_base = OTHER; note = thymine
  modified_base 2348..2349: mod_base = OTHER; note = thymine
  modified_base 2351: mod_base = OTHER; note = thymine
  modified_base 2354..2355: mod_base = OTHER; note = thymine
  modified_base 2358: mod_base = OTHER; note = thymine
  modified_base 2360..2364: mod_base = OTHER; note = thymine
  modified_base 2367: mod_base = OTHER; note = thymine
  modified_base 2373: mod_base = OTHER; note = thymine
  modified_base 2376: mod_base = OTHER; note = thymine
  modified_base 2379: mod_base = OTHER; note = thymine
  modified_base 2385: mod_base = OTHER; note = thymine
  modified_base 2389..2391: mod_base = OTHER; note = thymine
  modified_base 2400: mod_base = OTHER; note = thymine
  modified_base 2403: mod_base = OTHER; note = thymine
  modified_base 2406: mod_base = OTHER; note = thymine
  modified_base 2408..2409: mod_base = OTHER; note = thymine
  modified_base 2417..2418: mod_base = OTHER; note = thymine
  modified_base 2421: mod_base = OTHER; note = thymine
  modified_base 2424: mod_base = OTHER; note = thymine
  modified_base 2426..2427: mod_base = OTHER; note = thymine
  modified_base 2429..2430: mod_base = OTHER; note = thymine
  modified_base 2433: mod_base = OTHER; note = thymine
  modified_base 2441..2443: mod_base = OTHER; note = thymine
  modified_base 2445..2446: mod_base = OTHER; note = thymine
  modified_base 2448: mod_base = OTHER; note = thymine
  modified_base 2451: mod_base = OTHER; note = thymine
  modified_base 2454: mod_base = OTHER; note = thymine
  modified_base 2460: mod_base = OTHER; note = thymine
  modified_base 2462..2463: mod_base = OTHER; note = thymine
  modified_base 2466: mod_base = OTHER; note = thymine
  modified_base 2470: mod_base = OTHER; note = thymine
  modified_base 2472: mod_base = OTHER; note = thymine
  modified_base 2474..2475: mod_base = OTHER; note = thymine
  modified_base 2478: mod_base = OTHER; note = thymine
  modified_base 2481: mod_base = OTHER; note = thymine
  modified_base 2483..2487: mod_base = OTHER; note = thymine
  modified_base 2489..2491: mod_base = OTHER; note = thymine
  modified_base 2493: mod_base = OTHER; note = thymine
  modified_base 2496: mod_base = OTHER; note = thymine
  modified_base 2499: mod_base = OTHER; note = thymine
  modified_base 2502: mod_base = OTHER; note = thymine
  modified_base 2505: mod_base = OTHER; note = thymine
  modified_base 2508: mod_base = OTHER; note = thymine
  modified_base 2513: mod_base = OTHER; note = thymine
  modified_base 2515: mod_base = OTHER; note = thymine
  modified_base 2517: mod_base = OTHER; note = thymine
  modified_base 2520: mod_base = OTHER; note = thymine
  modified_base 2526: mod_base = OTHER; note = thymine
  modified_base 2529: mod_base = OTHER; note = thymine
  modified_base 2531: mod_base = OTHER; note = thymine
  modified_base 2538: mod_base = OTHER; note = thymine
  modified_base 2540..2541: mod_base = OTHER; note = thymine
  modified_base 2545: mod_base = OTHER; note = thymine
  modified_base 2547: mod_base = OTHER; note = thymine
  modified_base 2550: mod_base = OTHER; note = thymine
  modified_base 2556: mod_base = OTHER; note = thymine
  modified_base 2558..2559: mod_base = OTHER; note = thymine
  modified_base 2562: mod_base = OTHER; note = thymine
  modified_base 2568: mod_base = OTHER; note = thymine
  modified_base 2570..2572: mod_base = OTHER; note = thymine
  modified_base 2574: mod_base = OTHER; note = thymine
  modified_base 2576..2577: mod_base = OTHER; note = thymine
  modified_base 2579..2580: mod_base = OTHER; note = thymine
  modified_base 2583: mod_base = OTHER; note = thymine
  modified_base 2585..2586: mod_base = OTHER; note = thymine
  modified_base 2589: mod_base = OTHER; note = thymine
  modified_base 2591..2592: mod_base = OTHER; note = thymine
  modified_base 2595: mod_base = OTHER; note = thymine
  modified_base 2600..2601: mod_base = OTHER; note = thymine
  modified_base 2606..2607: mod_base = OTHER; note = thymine
  modified_base 2613: mod_base = OTHER; note = thymine
  modified_base 2615..2616: mod_base = OTHER; note = thymine
  modified_base 2624: mod_base = OTHER; note = thymine
  modified_base 2627..2628: mod_base = OTHER; note = thymine
  modified_base 2631: mod_base = OTHER; note = thymine
  modified_base 2634: mod_base = OTHER; note = thymine
  modified_base 2640: mod_base = OTHER; note = thymine
  modified_base 2646: mod_base = OTHER; note = thymine
  modified_base 2651..2653: mod_base = OTHER; note = thymine
  modified_base 2655: mod_base = OTHER; note = thymine
  modified_base 2661: mod_base = OTHER; note = thymine
  modified_base 2663..2664: mod_base = OTHER; note = thymine
  modified_base 2670: mod_base = OTHER; note = thymine
  modified_base 2673: mod_base = OTHER; note = thymine
  modified_base 2675..2676: mod_base = OTHER; note = thymine
  modified_base 2682: mod_base = OTHER; note = thymine
  modified_base 2685: mod_base = OTHER; note = thymine
  modified_base 2691: mod_base = OTHER; note = thymine
  modified_base 2694: mod_base = OTHER; note = thymine
  modified_base 2697: mod_base = OTHER; note = thymine
  modified_base 2700: mod_base = OTHER; note = thymine
  modified_base 2706..2709: mod_base = OTHER; note = thymine
  modified_base 2712: mod_base = OTHER; note = thymine
  modified_base 2718..2722: mod_base = OTHER; note = thymine
  modified_base 2724: mod_base = OTHER; note = thymine
  modified_base 2728: mod_base = OTHER; note = thymine
  modified_base 2730: mod_base = OTHER; note = thymine
  modified_base 2733: mod_base = OTHER; note = thymine
  modified_base 2739: mod_base = OTHER; note = thymine
  modified_base 2742: mod_base = OTHER; note = thymine
  modified_base 2745: mod_base = OTHER; note = thymine
  modified_base 2748: mod_base = OTHER; note = thymine
  modified_base 2751: mod_base = OTHER; note = thymine
  modified_base 2759..2760: mod_base = OTHER; note = thymine
  modified_base 2766: mod_base = OTHER; note = thymine
  modified_base 2768..2769: mod_base = OTHER; note = thymine
  modified_base 2772: mod_base = OTHER; note = thymine
  modified_base 2774..2775: mod_base = OTHER; note = thymine
  modified_base 2783..2784: mod_base = OTHER; note = thymine
  modified_base 2793: mod_base = OTHER; note = thymine
  modified_base 2796: mod_base = OTHER; note = thymine
  modified_base 2798..2800: mod_base = OTHER; note = thymine
  modified_base 2804..2805: mod_base = OTHER; note = thymine
  modified_base 2808: mod_base = OTHER; note = thymine
  modified_base 2811: mod_base = OTHER; note = thymine
  modified_base 2814: mod_base = OTHER; note = thymine
  modified_base 2817: mod_base = OTHER; note = thymine
  modified_base 2820: mod_base = OTHER; note = thymine
  modified_base 2822..2823: mod_base = OTHER; note = thymine
  modified_base 2826: mod_base = OTHER; note = thymine
  modified_base 2829: mod_base = OTHER; note = thymine
  modified_base 2832: mod_base = OTHER; note = thymine
  modified_base 2835: mod_base = OTHER; note = thymine
  modified_base 2838: mod_base = OTHER; note = thymine
  modified_base 2840: mod_base = OTHER; note = thymine
  modified_base 2843..2844: mod_base = OTHER; note = thymine
  modified_base 2847: mod_base = OTHER; note = thymine
  modified_base 2849..2850: mod_base = OTHER; note = thymine
  modified_base 2853: mod_base = OTHER; note = thymine
  modified_base 2855..2859: mod_base = OTHER; note = thymine
  modified_base 2868: mod_base = OTHER; note = thymine
  modified_base 2871: mod_base = OTHER; note = thymine
  modified_base 2875: mod_base = OTHER; note = thymine
  modified_base 2877..2878: mod_base = OTHER; note = thymine
  modified_base 2880: mod_base = OTHER; note = thymine
  modified_base 2882..2883: mod_base = OTHER; note = thymine
  modified_base 2885..2886: mod_base = OTHER; note = thymine
  modified_base 2889: mod_base = OTHER; note = thymine
  modified_base 2891..2893: mod_base = OTHER; note = thymine
  modified_base 2895..2896: mod_base = OTHER; note = thymine
  modified_base 2898..2899: mod_base = OTHER; note = thymine
  modified_base 2906..2907: mod_base = OTHER; note = thymine
  modified_base 2910: mod_base = OTHER; note = thymine
  modified_base 2916: mod_base = OTHER; note = thymine
  modified_base 2918..2919: mod_base = OTHER; note = thymine
  modified_base 2921..2922: mod_base = OTHER; note = thymine
  modified_base 2925: mod_base = OTHER; note = thymine
  modified_base 2928: mod_base = OTHER; note = thymine
  modified_base 2931: mod_base = OTHER; note = thymine
  modified_base 2934: mod_base = OTHER; note = thymine
  modified_base 2936..2937: mod_base = OTHER; note = thymine
  modified_base 2939..2940: mod_base = OTHER; note = thymine
  modified_base 2946: mod_base = OTHER; note = thymine
  modified_base 2952: mod_base = OTHER; note = thymine
  modified_base 2961..2962: mod_base = OTHER; note = thymine
  modified_base 2969..2970: mod_base = OTHER; note = thymine
  modified_base 2972..2973: mod_base = OTHER; note = thymine
  modified_base 2976: mod_base = OTHER; note = thymine
  modified_base 2979..2980: mod_base = OTHER; note = thymine
  modified_base 2982..2985: mod_base = OTHER; note = thymine
  modified_base 2988..2991: mod_base = OTHER; note = thymine
  modified_base 2995..2998: mod_base = OTHER; note = thymine
  modified_base 3000: mod_base = OTHER; note = thymine
  modified_base 3002..3003: mod_base = OTHER; note = thymine
  modified_base 3006: mod_base = OTHER; note = thymine
  modified_base 3009: mod_base = OTHER; note = thymine
  modified_base 3012: mod_base = OTHER; note = thymine
  modified_base 3015: mod_base = OTHER; note = thymine
  modified_base 3017..3018: mod_base = OTHER; note = thymine
  modified_base 3020..3021: mod_base = OTHER; note = thymine
  modified_base 3026..3027: mod_base = OTHER; note = thymine
  modified_base 3029..3030: mod_base = OTHER; note = thymine
  modified_base 3033: mod_base = OTHER; note = thymine
  modified_base 3042: mod_base = OTHER; note = thymine
  modified_base 3045: mod_base = OTHER; note = thymine
  modified_base 3047: mod_base = OTHER; note = thymine
  modified_base 3049..3051: mod_base = OTHER; note = thymine
  modified_base 3054..3055: mod_base = OTHER; note = thymine
  modified_base 3057..3060: mod_base = OTHER; note = thymine
  modified_base 3063..3064: mod_base = OTHER; note = thymine
  modified_base 3066..3067: mod_base = OTHER; note = thymine
  modified_base 3069: mod_base = OTHER; note = thymine
  modified_base 3072: mod_base = OTHER; note = thymine
  modified_base 3075: mod_base = OTHER; note = thymine
  modified_base 3078: mod_base = OTHER; note = thymine
  modified_base 3081: mod_base = OTHER; note = thymine
  modified_base 3084: mod_base = OTHER; note = thymine
  modified_base 3087: mod_base = OTHER; note = thymine
  modified_base 3089..3090: mod_base = OTHER; note = thymine
  modified_base 3093: mod_base = OTHER; note = thymine
  modified_base 3095..3096: mod_base = OTHER; note = thymine
  modified_base 3099: mod_base = OTHER; note = thymine
  modified_base 3101..3102: mod_base = OTHER; note = thymine
  modified_base 3105: mod_base = OTHER; note = thymine
  modified_base 3108: mod_base = OTHER; note = thymine
  modified_base 3110..3111: mod_base = OTHER; note = thymine
  modified_base 3114: mod_base = OTHER; note = thymine
  modified_base 3117: mod_base = OTHER; note = thymine
  modified_base 3122..3123: mod_base = OTHER; note = thymine
  modified_base 3126: mod_base = OTHER; note = thymine
  modified_base 3132: mod_base = OTHER; note = thymine
  modified_base 3135: mod_base = OTHER; note = thymine
  modified_base 3137..3138: mod_base = OTHER; note = thymine
  modified_base 3140..3141: mod_base = OTHER; note = thymine
  modified_base 3147: mod_base = OTHER; note = thymine
  modified_base 3149..3150: mod_base = OTHER; note = thymine
  modified_base 3153: mod_base = OTHER; note = thymine
  modified_base 3155..3156: mod_base = OTHER; note = thymine
  modified_base 3162: mod_base = OTHER; note = thymine
  modified_base 3165: mod_base = OTHER; note = thymine
  modified_base 3167..3169: mod_base = OTHER; note = thymine
  modified_base 3171..3174: mod_base = OTHER; note = thymine
  modified_base 3181: mod_base = OTHER; note = thymine
  modified_base 3183: mod_base = OTHER; note = thymine
  modified_base 3188..3189: mod_base = OTHER; note = thymine
  modified_base 3192: mod_base = OTHER; note = thymine
  modified_base 3197..3198: mod_base = OTHER; note = thymine
  modified_base 3201: mod_base = OTHER; note = thymine
  modified_base 3209..3210: mod_base = OTHER; note = thymine
  modified_base 3213: mod_base = OTHER; note = thymine
  modified_base 3216..3217: mod_base = OTHER; note = thymine
  modified_base 3219: mod_base = OTHER; note = thymine
  modified_base 3222: mod_base = OTHER; note = thymine
  modified_base 3224..3225: mod_base = OTHER; note = thymine
  modified_base 3234: mod_base = OTHER; note = thymine
  modified_base 3237: mod_base = OTHER; note = thymine
  modified_base 3240: mod_base = OTHER; note = thymine
  modified_base 3242..3243: mod_base = OTHER; note = thymine
  modified_base 3246: mod_base = OTHER; note = thymine
  misc_feature 1..3249: note = Synthetic
  source 1..3249: mol_type = other RNA
atggctgcttttaagcctaattctattaattatattcttggtcttgatattggtattgcttctgttggttgggctatggttgagattgatgaggaggagaatcctattcgtcttattgatcttggtgttcgtgtttttgagcgtgctgaggttcctaagactggtgattctcttgctatggctcgtcgtcttgctcgttctgttcgtcgtcttactcgtcgtcgtgctcatcgtcttcttcgtactcgtcgtcttcttaagcgtgagggtgttcttcaggctgctaattttgatgagaatggtcttattaagtctcttcctaatactccttggcagcttcgtgctgctgctcttgatcgtaagcttactcctcttgagtggtctgctgttcttcttcatcttattaagcatcgtggttatctttctcagcgtaagaatgagggtgagactgctgataaggagcttggtgctcttcttaagggtgttgctggtaatgctcatgctcttcagactggtgattttcgtactcctgctgagcttgctcttaataagtttgagaaggagtctggtcatattcgtaatcagcgttctgattattctcatactttttctcgtaaggatcttcaggctgagcttattcttctttttgagaagcagaaggagtttggtaatcctcatgtttctggtggtcttaaggagggtattgagactcttcttatgactcagcgtcctgctctttctggtgatgctgttcagaagatgcttggtcattgtacttttgagcctgctgagcctaaggctgctaagaatacttatactgctgagcgttttatttggcttactaagcttaataatcttcgtattcttgagcagggttctgagcgtcctcttactgatactgagcgtgctactcttatggatgagccttatcgtaagtctaagcttacttatgctcaggctcgtaagcttcttggtcttgaggatactgctttttttaagggtcttcgttatggtaaggataatgctgaggcttctactcttatggagatgaaggcttatcatgctatttctcgtgctcttgagaaggagggtcttaaggataagaagtctcctcttaatctttctcctgagcttcaggatgagattggtactgctttttctctttttaagactgatgaggatattactggtcgtcttaaggatcgtattcagcctgagattcttgaggctcttcttaagcatatttcttttgataagtttgttcagatttctcttaaggctcttcgtcgtattgttcctcttatggagcagggtaagcgttatgatgaggcttgtgctgagatttatggtgatcattatggtaagaagaatactgaggagaagatttatcttcctcctattcctgctgatgagattcgtaatcctgttgttcttcgtgctctttctcaggctcgtaaggttattaatggtgttgttcgtcgttatggttctcctgctcgtattcatattgagactgctcgtgaggttggtaagtcttttaaggatcgtaaggagattgagaagcgtcaggaggagaatcgtaaggatcgtgagaaggctgctgctaagtttcgtgagtattttcctaattttgttggtgagcctaagtctaaggatattcttaagcttcgtctttatgagcagcagcatggtaagtgtctttattctggtaaggagattaatcttggtcgtcttaatgagaagggttatgttgagattgatgctgctcttcctttttctcgtacttgggatgattcttttaataataaggttcttgttcttggttctgagaatcagaataagggtaatcagactccttatgagtattttaatggtaaggataattctcgtgagtggcaggagtttaaggctcgtgttgagacttctcgttttcctcgttctaagaagcagcgtattcttcttcagaagtttgatgaggatggttttaaggagcgtaatcttaatgatactcgttatgttaatcgttttctttgtcagtttgttgctgatcgtatgcgtcttactggtaagggtaagaagcgtgtttttgcttctaatggtcagattactaatcttcttcgtggtttttggggtcttcgtaaggttcgtgctgagaatgatcgtcatcatgctcttgatgctgttgttgttgcttgttctactgttgctatgcagcagaagattactcgttttgttcgttataaggagatgaatgcttttgatggtaagactattgataaggagactggtgaggttcttcatcagaagactcattttcctcagccttgggagttttttgctcaggaggttatgattcgtgtttttggtaagcctgatggtaagcctgagtttgaggaggctgatactcttgagaagcttcgtactcttcttgctgagaagctttcttctcgtcctgaggctgttcatgagtatgttactcctctttttgtttctcgtgctcctaatcgtaagatgtctggtcagggtcatatggagactgttaagtctgctaagcgtcttgatgagggtgtttctgttcttcgtgttcctcttactcagcttaagcttaaggatcttgagaagatggttaatcgtgagcgtgagcctaagctttatgaggctcttaaggctcgtcttgaggctcataaggatgatcctgctaaggcttttgctgagcctttttataagtatgataaggctggtaatcgtactcagcaggttaaggctgttcgtgttgagcaggttcagaagactggtgtttgggttcgtaatcataatggtattgctgataatgctactatggttcgtgttgatgtttttgagaagggtgataagtattatcttgttcctatttattcttggcaggttgctaagggtattcttcctgatcgtgctgttgttcagggtaaggatgaggaggattggcagcttattgatgattcttttaattttaagttttctcttcatcctaatgatcttgttgaggttattactaagaaggctcgtatgtttggttattttgcttcttgtcatcgtggtactggtaatattaatattcgtattcatgatcttgatcataagattggtaagaatggtattcttgagggtattggtgttaagactgctctttcttttcagaagtatcagattgatgagcttggtaaggagattcgtccttgtcgtcttaagaagcgtcctcctgttcgttga

SEQ ID NO: 246 - RNA, 3249 nt, synthetic construct
  modified_base 2: mod_base = OTHER; note = thymine
  modified_base 10..11: mod_base = OTHER; note = thymine
  modified_base 22: mod_base = OTHER; note = thymine
  modified_base 26: mod_base = OTHER; note = thymine
  modified_base 31: mod_base = OTHER; note = thymine
  modified_base 35: mod_base = OTHER; note = thymine
  modified_base 38: mod_base = OTHER; note = thymine
  modified_base 44: mod_base = OTHER; note = thymine
  modified_base 50: mod_base = OTHER; note = thymine
  modified_base 56: mod_base = OTHER; note = thymine
  modified_base 61: mod_base = OTHER; note = thymine
  modified_base 65: mod_base = OTHER; note = thymine
  modified_base 70: mod_base = OTHER; note = thymine
  modified_base 77: mod_base = OTHER; note = thymine
  modified_base 80: mod_base = OTHER; note = thymine
  modified_base 86: mod_base = OTHER; note = thymine
  modified_base 107: mod_base = OTHER; note = thymine
  modified_base 113: mod_base = OTHER; note = thymine
  modified_base 116: mod_base = OTHER; note = thymine
  modified_base 122: mod_base = OTHER; note = thymine
  modified_base 128: mod_base = OTHER; note = thymine
  modified_base 134: mod_base = OTHER; note = thymine
  modified_base 136..137: mod_base = OTHER; note = thymine
  modified_base 152: mod_base = OTHER; note = thymine
  modified_base 169: mod_base = OTHER; note = thymine
  modified_base 173: mod_base = OTHER; note = thymine
  modified_base 179: mod_base = OTHER; note = thymine
  modified_base 191: mod_base = OTHER; note = thymine
  modified_base 199: mod_base = OTHER; note = thymine
  modified_base 203: mod_base = OTHER; note = thymine
  modified_base 212: mod_base = OTHER; note = thymine
  modified_base 236: mod_base = OTHER; note = thymine
  modified_base 239: mod_base = OTHER; note = thymine
  modified_base 254: mod_base = OTHER; note = thymine
  modified_base 257: mod_base = OTHER; note = thymine
  modified_base 272: mod_base = OTHER; note = thymine
  modified_base 275: mod_base = OTHER; note = thymine
  modified_base 289..290: mod_base = OTHER; note = thymine
  modified_base 305: mod_base = OTHER; note = thymine
  modified_base 308: mod_base = OTHER; note = thymine
  modified_base 313: mod_base = OTHER; note = thymine
  modified_base 317: mod_base = OTHER; note = thymine
  modified_base 331: mod_base = OTHER; note = thymine
  modified_base 338: mod_base = OTHER; note = thymine
  modified_base 353: mod_base = OTHER; note = thymine
  modified_base 365: mod_base = OTHER; note = thymine
  modified_base 374: mod_base = OTHER; note = thymine
  modified_base 379: mod_base = OTHER; note = thymine
  modified_base 382: mod_base = OTHER; note = thymine
  modified_base 389: mod_base = OTHER; note = thymine
  modified_base 392: mod_base = OTHER; note = thymine
  modified_base 395: mod_base = OTHER; note = thymine
  modified_base 401: mod_base = OTHER; note = thymine
  modified_base 404: mod_base = OTHER; note = thymine
  modified_base 418: mod_base = OTHER; note = thymine
  modified_base 422: mod_base = OTHER; note = thymine
  modified_base 424: mod_base = OTHER; note = thymine
  modified_base 464: mod_base = OTHER; note = thymine
  modified_base 473: mod_base = OTHER; note = thymine
  modified_base 476: mod_base = OTHER; note = thymine
  modified_base 485: mod_base = OTHER; note = thymine
  modified_base 506: mod_base = OTHER; note = thymine
  modified_base 520..521: mod_base = OTHER; note = thymine
  modified_base 539: mod_base = OTHER; note = thymine
  modified_base 545: mod_base = OTHER; note = thymine
  modified_base 553..554: mod_base = OTHER; note = thymine
  modified_base 565: mod_base = OTHER; note = thymine
  modified_base 575: mod_base = OTHER; note = thymine
  modified_base 589: mod_base = OTHER; note = thymine
  modified_base 595: mod_base = OTHER; note = thymine
  modified_base 598: mod_base = OTHER; note = thymine
  modified_base 607..608: mod_base = OTHER; note = thymine
  modified_base 610: mod_base = OTHER; note = thymine
  modified_base 623: mod_base = OTHER; note = thymine
  modified_base 635: mod_base = OTHER; note = thymine
  modified_base 638: mod_base = OTHER; note = thymine
  modified_base 641: mod_base = OTHER; note = thymine
  modified_base 644: mod_base = OTHER; note = thymine
  modified_base 646..647: mod_base = OTHER; note = thymine
  modified_base 664..665: mod_base = OTHER; note = thymine
  modified_base 680: mod_base = OTHER; note = thymine
  modified_base 682: mod_base = OTHER; note = thymine
  modified_base 692: mod_base = OTHER; note = thymine
  modified_base 704: mod_base = OTHER; note = thymine
  modified_base 713: mod_base = OTHER; note = thymine
  modified_base 716: mod_base = OTHER; note = thymine
  modified_base 719: mod_base = OTHER; note = thymine
  modified_base 737: mod_base = OTHER; note = thymine
  modified_base 739: mod_base = OTHER; note = thymine
  modified_base 752: mod_base = OTHER; note = thymine
  modified_base 761: mod_base = OTHER; note = thymine
  modified_base 764: mod_base = OTHER; note = thymine
  modified_base 772: mod_base = OTHER; note = thymine
  modified_base 778..779: mod_base = OTHER; note = thymine
  modified_base 814: mod_base = OTHER; note = thymine
  modified_base 829..830: mod_base = OTHER; note = thymine
  modified_base 833: mod_base = OTHER; note = thymine
  modified_base 835: mod_base = OTHER; note = thymine
  modified_base 839: mod_base = OTHER; note = thymine
  modified_base 848: mod_base = OTHER; note = thymine
  modified_base 857: mod_base = OTHER; note = thymine
  modified_base 863: mod_base = OTHER; note = thymine
  modified_base 866: mod_base = OTHER; note = thymine
  modified_base 877: mod_base = OTHER; note = thymine
  modified_base 890: mod_base = OTHER; note = thymine
  modified_base 914: mod_base = OTHER; note = thymine
  modified_base 917: mod_base = OTHER; note = thymine
  modified_base 928: mod_base = OTHER; note = thymine
  modified_base 937: mod_base = OTHER; note = thymine
  modified_base 944: mod_base = OTHER; note = thymine
  modified_base 949: mod_base = OTHER; note = thymine
  modified_base 968: mod_base = OTHER; note = thymine
  modified_base 971: mod_base = OTHER; note = thymine
  modified_base 977: mod_base = OTHER; note = thymine
  modified_base 991..992: mod_base = OTHER; note = thymine
  modified_base 994..995: mod_base = OTHER; note = thymine
  modified_base 1004: mod_base = OTHER; note = thymine
  modified_base 1009: mod_base = OTHER; note = thymine
  modified_base 1033: mod_base = OTHER; note = thymine
  modified_base 1040: mod_base = OTHER; note = thymine
  modified_base 1043: mod_base = OTHER; note = thymine
  modified_base 1049: mod_base = OTHER; note = thymine
  modified_base 1057: mod_base = OTHER; note = thymine
  modified_base 1067: mod_base = OTHER; note = thymine
  modified_base 1069: mod_base = OTHER; note = thymine
  modified_base 1079: mod_base = OTHER; note = thymine
  modified_base 1094: mod_base = OTHER; note = thymine
  modified_base 1108: mod_base = OTHER; note = thymine
  modified_base 1115: mod_base = OTHER; note = thymine
  modified_base 1121: mod_base = OTHER; note = thymine
  modified_base 1123: mod_base = OTHER; note = thymine
  modified_base 1133: mod_base = OTHER; note = thymine
  modified_base 1145: mod_base = OTHER; note = thymine
  modified_base 1156..1157: mod_base = OTHER; note = thymine
  modified_base 1159: mod_base = OTHER; note = thymine
  modified_base 1163: mod_base = OTHER; note = thymine
  modified_base 1165..1166: mod_base = OTHER; note = thymine
  modified_base 1184: mod_base = OTHER; note = thymine
  modified_base 1196: mod_base = OTHER; note = thymine
  modified_base 1208: mod_base = OTHER; note = thymine
  modified_base 1220: mod_base = OTHER; note = thymine
  modified_base 1223: mod_base = OTHER; note = thymine
  modified_base 1232: mod_base = OTHER; note = thymine
  modified_base 1235: mod_base = OTHER; note = thymine
  modified_base 1244: mod_base = OTHER; note = thymine
  modified_base 1246: mod_base = OTHER; note = thymine
  modified_base 1249..1250: mod_base = OTHER; note = thymine
  modified_base 1258..1259: mod_base = OTHER; note = thymine
  modified_base 1262: mod_base = OTHER; note = thymine
  modified_base 1268: mod_base = OTHER; note = thymine
  modified_base 1270: mod_base = OTHER; note = thymine
  modified_base 1274: mod_base = OTHER; note = thymine
  modified_base 1283: mod_base = OTHER; note = thymine
  modified_base 1292: mod_base = OTHER; note = thymine
  modified_base 1295: mod_base = OTHER; note = thymine
  modified_base 1301: mod_base = OTHER; note = thymine
  modified_base 1304: mod_base = OTHER; note = thymine
  modified_base 1321: mod_base = OTHER; note = thymine
  modified_base 1333: mod_base = OTHER; note = thymine
  modified_base 1343: mod_base = OTHER; note = thymine
  modified_base 1345: mod_base = OTHER; note = thymine
  modified_base 1357: mod_base = OTHER; note = thymine
  modified_base 1385: mod_base = OTHER; note = thymine
  modified_base 1387: mod_base = OTHER; note = thymine
  modified_base 1391: mod_base = OTHER; note = thymine
  modified_base 1400: mod_base = OTHER; note = thymine
  modified_base 1415: mod_base = OTHER; note = thymine
  modified_base 1427: mod_base = OTHER; note = thymine
  modified_base 1430: mod_base = OTHER; note = thymine
  modified_base 1433: mod_base = OTHER; note = thymine
  modified_base 1442: mod_base = OTHER; note = thymine
  modified_base 1444: mod_base = OTHER; note = thymine
  modified_base 1460: mod_base = OTHER; note = thymine
  modified_base 1463: mod_base = OTHER; note = thymine
  modified_base 1472: mod_base = OTHER; note = thymine
  modified_base 1475: mod_base = OTHER; note = thymine
  modified_base 1483: mod_base = OTHER; note = thymine
  modified_base 1489: mod_base = OTHER; note = thymine
  modified_base 1502: mod_base = OTHER; note = thymine
  modified_base 1508: mod_base = OTHER; note = thymine
  modified_base 1526: mod_base = OTHER; note = thymine
  modified_base 1534: mod_base = OTHER; note = thymine
  modified_base 1537..1538: mod_base = OTHER; note = thymine
  modified_base 1556: mod_base = OTHER; note = thymine
  modified_base 1609..1610: mod_base = OTHER; note = thymine
  modified_base 1618: mod_base = OTHER; note = thymine
  modified_base 1621..1622: mod_base = OTHER; note = thymine
  modified_base 1630..1631: mod_base = OTHER; note = thymine
  modified_base 1634: mod_base = OTHER; note = thymine
  modified_base 1648: mod_base = OTHER; note = thymine
  modified_base 1658: mod_base = OTHER; note = thymine
  modified_base 1661: mod_base = OTHER; note = thymine
  modified_base 1667: mod_base = OTHER; note = thymine
  modified_base 1673: mod_base = OTHER; note = thymine
  modified_base 1675: mod_base = OTHER; note = thymine
  modified_base 1696: mod_base = OTHER; note = thymine
  modified_base 1700: mod_base = OTHER; note = thymine
  modified_base 1702: mod_base = OTHER; note = thymine
  modified_base 1705: mod_base = OTHER; note = thymine
  modified_base 1718: mod_base = OTHER; note = thymine
  modified_base 1724: mod_base = OTHER; note = thymine
  modified_base 1733: mod_base = OTHER; note = thymine
  modified_base 1747: mod_base = OTHER; note = thymine
  modified_base 1751: mod_base = OTHER; note = thymine
  modified_base 1757: mod_base = OTHER; note = thymine
  modified_base 1769: mod_base = OTHER; note = thymine
  modified_base 1774..1775: mod_base = OTHER; note = thymine
  modified_base 1777: mod_base = OTHER; note = thymine
  modified_base 1786: mod_base = OTHER; note = thymine
  modified_base 1795: mod_base = OTHER; note = thymine
  modified_base 1798..1799: mod_base = OTHER; note = thymine
  modified_base 1811: mod_base = OTHER; note = thymine
  modified_base 1814: mod_base = OTHER; note = thymine
  modified_base 1817: mod_base = OTHER; note = thymine
  modified_base 1820: mod_base = OTHER; note = thymine
  modified_base 1825: mod_base = OTHER; note = thymine
  modified_base 1858: mod_base = OTHER; note = thymine
  modified_base 1864: mod_base = OTHER; note = thymine
  modified_base 1867..1868: mod_base = OTHER; note = thymine
  modified_base 1885: mod_base = OTHER; note = thymine
  modified_base 1894: mod_base = OTHER; note = thymine
  modified_base 1903..1904: mod_base = OTHER; note = thymine
  modified_base 1916: mod_base = OTHER; note = thymine
  modified_base 1924: mod_base = OTHER; note = thymine
  modified_base 1930..1931: mod_base = OTHER; note = thymine
  modified_base 1939: mod_base = OTHER; note = thymine
  modified_base 1955: mod_base = OTHER; note = thymine
  modified_base 1958: mod_base = OTHER; note = thymine
  modified_base 1961: mod_base = OTHER; note = thymine
  modified_base 1969..1970: mod_base = OTHER; note = thymine
  modified_base 1984..1985: mod_base = OTHER; note = thymine
  modified_base 2000: mod_base = OTHER; note = thymine
  modified_base 2014: mod_base = OTHER; note = thymine
  modified_base 2018: mod_base = OTHER; note = thymine
  modified_base 2026..2027: mod_base = OTHER; note = thymine
  modified_base 2030: mod_base = OTHER; note = thymine
  modified_base 2032: mod_base = OTHER; note = thymine
  modified_base 2038..2039: mod_base = OTHER; note = thymine
  modified_base 2042: mod_base = OTHER; note = thymine
  modified_base 2054: mod_base = OTHER; note = thymine
  modified_base 2060: mod_base = OTHER; note = thymine
  modified_base 2084: mod_base = OTHER; note = thymine
  modified_base 2086..2087: mod_base = OTHER; note = thymine
  modified_base 2092: mod_base = OTHER; note = thymine
  modified_base 2105: mod_base = OTHER; note = thymine
  modified_base 2114: mod_base = OTHER; note = thymine
  modified_base 2117: mod_base = OTHER; note = thymine
  modified_base 2125..2126: mod_base = OTHER; note = thymine
  modified_base 2128: mod_base = OTHER; note = thymine
  modified_base 2135: mod_base = OTHER; note = thymine
  modified_base 2144: mod_base = OTHER; note = thymine
  modified_base 2174: mod_base = OTHER; note = thymine
  modified_base 2183: mod_base = OTHER; note = thymine
  modified_base 2186: mod_base = OTHER; note = thymine
  modified_base 2189: mod_base = OTHER; note = thymine
  modified_base 2194: mod_base = OTHER; note = thymine
  modified_base 2197: mod_base = OTHER; note = thymine
  modified_base 2204: mod_base = OTHER; note = thymine
  modified_base 2210: mod_base = OTHER; note = thymine
  modified_base 2222: mod_base = OTHER; note = thymine
  modified_base 2230..2231: mod_base = OTHER; note = thymine
  modified_base 2234: mod_base = OTHER; note = thymine
  modified_base 2239: mod_base = OTHER; note = thymine
  modified_base 2249: mod_base = OTHER; note = thymine
  modified_base 2257..2258: mod_base = OTHER; note = thymine
  modified_base 2273: mod_base = OTHER; note = thymine
  modified_base 2294: mod_base = OTHER; note = thymine
  modified_base 2297: mod_base = OTHER; note = thymine
  modified_base 2314..2315: mod_base = OTHER; note = thymine
  modified_base 2326: mod_base = OTHER; note = thymine
  modified_base 2332..2333: mod_base = OTHER; note = thymine
  modified_base 2335..2336: mod_base = OTHER; note = thymine
  modified_base 2348: mod_base = OTHER; note = thymine
  modified_base 2351: mod_base = OTHER; note = thymine
  modified_base 2354: mod_base = OTHER; note = thymine
  modified_base 2360: mod_base = OTHER; note = thymine
  modified_base 2362..2363: mod_base = OTHER; note = thymine
  modified_base 2389..2390: mod_base = OTHER; note = thymine
  modified_base 2408: mod_base = OTHER; note = thymine
  modified_base 2417: mod_base = OTHER; note = thymine
  modified_base 2426: mod_base = OTHER; note = thymine
  modified_base 2429: mod_base = OTHER; note = thymine
  modified_base 2441: mod_base = OTHER; note = thymine
  modified_base 2443: mod_base = OTHER; note = thymine
  modified_base 2446: mod_base = OTHER; note = thymine
  modified_base 2462: mod_base = OTHER; note = thymine
  modified_base 2470: mod_base = OTHER; note = thymine
  modified_base 2474: mod_base = OTHER; note = thymine
  modified_base 2483: mod_base = OTHER; note = thymine
  modified_base 2485..2486: mod_base = OTHER; note = thymine
  modified_base 2489: mod_base = OTHER; note = thymine
  modified_base 2491: mod_base = OTHER; note = thymine
  modified_base 2513: mod_base = OTHER; note = thymine
  modified_base 2515: mod_base = OTHER; note = thymine
  modified_base 2531: mod_base = OTHER; note = thymine
  modified_base 2540: mod_base = OTHER; note = thymine
  modified_base 2545: mod_base = OTHER; note = thymine
  modified_base 2558: mod_base = OTHER; note = thymine
  modified_base 2570: mod_base = OTHER; note = thymine
  modified_base 2572: mod_base = OTHER; note = thymine
  modified_base 2576: mod_base = OTHER; note = thymine
  modified_base 2579: mod_base = OTHER; note = thymine
  modified_base 2585: mod_base = OTHER; note = thymine
  modified_base 2591: mod_base = OTHER; note = thymine
  modified_base 2600: mod_base = OTHER; note = thymine
  modified_base 2606: mod_base = OTHER; note = thymine
  modified_base 2615: mod_base = OTHER; note = thymine
  modified_base 2624: mod_base = OTHER; note = thymine
  modified_base 2627: mod_base = OTHER; note = thymine
  modified_base 2651: mod_base = OTHER; note = thymine
  modified_base 2653: mod_base = OTHER; note = thymine
  modified_base 2663: mod_base = OTHER; note = thymine
  modified_base 2675: mod_base = OTHER; note = thymine
  modified_base 2707..2708: mod_base = OTHER; note = thymine
  modified_base 2719..2720: mod_base = OTHER; note = thymine
  modified_base 2722: mod_base = OTHER; note = thymine
  modified_base 2728: mod_base = OTHER; note = thymine
  modified_base 2759: mod_base = OTHER; note = thymine
  modified_base 2768: mod_base = OTHER; note = thymine
  modified_base 2774: mod_base = OTHER; note = thymine
  modified_base 2783: mod_base = OTHER; note = thymine
  modified_base 2798: mod_base = OTHER; note = thymine
  modified_base 2800: mod_base = OTHER; note = thymine
  modified_base 2804: mod_base = OTHER; note = thymine
  modified_base 2822: mod_base = OTHER; note = thymine
  modified_base 2840: mod_base = OTHER; note = thymine
  modified_base 2843: mod_base = OTHER; note = thymine
  modified_base 2849: mod_base = OTHER; note = thymine
  modified_base 2855: mod_base = OTHER; note = thymine
  modified_base 2857..2858: mod_base = OTHER; note = thymine
  modified_base 2875: mod_base = OTHER; note = thymine
  modified_base 2878: mod_base = OTHER; note = thymine
  modified_base 2882: mod_base = OTHER; note = thymine
  modified_base 2885: mod_base = OTHER; note = thymine
  modified_base 2891: mod_base = OTHER; note = thymine
  modified_base 2893: mod_base = OTHER; note = thymine
  modified_base 2896: mod_base = OTHER; note = thymine
  modified_base 2899: mod_base = OTHER; note = thymine
  modified_base 2906: mod_base = OTHER; note = thymine
  modified_base 2918: mod_base = OTHER; note = thymine
  modified_base 2921: mod_base = OTHER; note = thymine
  modified_base 2936: mod_base = OTHER; note = thymine
  modified_base 2939: mod_base = OTHER; note = thymine
  modified_base 2962: mod_base = OTHER; note = thymine
  modified_base 2969: mod_base = OTHER; note = thymine
  modified_base 2972: mod_base = OTHER; note = thymine
  modified_base 2980: mod_base = OTHER; note = thymine
  modified_base 2983..2984: mod_base = OTHER; note = thymine
  modified_base 2989..2990: mod_base = OTHER; note = thymine
  modified_base 2995..2996: mod_base = OTHER; note = thymine
  modified_base 2998: mod_base = OTHER; note = thymine
  modified_base 3002: mod_base = OTHER; note = thymine
  modified_base 3017: mod_base = OTHER; note = thymine
  modified_base 3020: mod_base = OTHER; note = thymine
  modified_base 3026: mod_base = OTHER; note = thymine
  modified_base 3029: mod_base = OTHER; note = thymine
  modified_base 3047: mod_base = OTHER; note = thymine
  modified_base 3049..3050: mod_base = OTHER; note = thymine
  modified_base 3055: mod_base = OTHER; note = thymine
  modified_base 3058..3059: mod_base = OTHER; note = thymine
  modified_base 3064: mod_base = OTHER; note = thymine
  modified_base 3067: mod_base = OTHER; note = thymine
  modified_base 3089: mod_base = OTHER; note = thymine
  modified_base 3095: mod_base = OTHER; note = thymine
  modified_base 3101: mod_base = OTHER; note = thymine
  modified_base 3110: mod_base = OTHER; note = thymine
  modified_base 3122: mod_base = OTHER; note = thymine
  modified_base 3137: mod_base = OTHER; note = thymine
  modified_base 3140: mod_base = OTHER; note = thymine
  modified_base 3149: mod_base = OTHER; note = thymine
  modified_base 3155: mod_base = OTHER; note = thymine
  modified_base 3167: mod_base = OTHER; note = thymine
  modified_base 3169: mod_base = OTHER; note = thymine
  modified_base 3172..3173: mod_base = OTHER; note = thymine
  modified_base 3181: mod_base = OTHER; note = thymine
  modified_base 3188: mod_base = OTHER; note = thymine
  modified_base 3197: mod_base = OTHER; note = thymine
  modified_base 3209: mod_base = OTHER; note = thymine
  modified_base 3217: mod_base = OTHER; note = thymine
  modified_base 3224: mod_base = OTHER; note = thymine
  modified_base 3242: mod_base = OTHER; note = thymine
  misc_feature 1..3249: note = Synthetic
  source 1..3249: mol_type = other RNA
atggccgccttcaagcccaactccatcaactacatcctgggcctggacatcggcatcgcctccgtgggctgggccatggtggagatcgacgaggaggagaaccccatccggctgatcgacctgggcgtgcgggtgttcgagcgggccgaggtgcccaagaccggcgactccctggccatggcccggcggctggcccggtccgtgcggcggctgacccggcggcgggcccaccggctgctgcggacccggcggctgctgaagcgggagggcgtgctgcaggccgccaacttcgacgagaacggcctgatcaagtccctgcccaacaccccctggcagctgcgggccgccgccctggaccggaagctgacccccctggagtggtccgccgtgctgctgcacctgatcaagcaccggggctacctgtcccagcggaagaacgagggcgagaccgccgacaaggagctgggcgccctgctgaagggcgtggccggcaacgcccacgccctgcagaccggcgacttccggacccccgccgagctggccctgaacaagttcgagaaggagtccggccacatccggaaccagcggtccgactactcccacaccttctcccggaaggacctgcaggccgagctgatcctgctgttcgagaagcagaaggagttcggcaacccccacgtgtccggcggcctgaaggagggcatcgagaccctgctgatgacccagcggcccgccctgtccggcgacgccgtgcagaagatgctgggccactgcaccttcgagcccgccgagcccaaggccgccaagaacacctacaccgccgagcggttcatctggctgaccaagctgaacaacctgcggatcctggagcagggctccgagcggcccctgaccgacaccgagcgggccaccctgatggacgagccctaccggaagtccaagctgacctacgcccaggcccggaagctgctgggcctggaggacaccgccttcttcaagggcctgcggtacggcaaggacaacgccgaggcctccaccctgatggagatgaaggcctaccacgccatctcccgggccctggagaaggagggcctgaaggacaagaagtcccccctgaacctgtcccccgagctgcaggacgagatcggcaccgccttctccctgttcaagaccgacgaggacatcaccggccggctgaaggaccggatccagcccgagatcctggaggccctgctgaagcacatctccttcgacaagttcgtgcagatctccctgaaggccctgcggcggatcgtgcccctgatggagcagggcaagcggtacgacgaggcctgcgccgagatctacggcgaccactacggcaagaagaacaccgaggagaagatctacctgccccccatccccgccgacgagatccggaaccccgtggtgctgcgggccctgtcccaggcccggaaggtgatcaacggcgtggtgcggcggtacggctcccccgcccggatccacatcgagaccgcccgggaggtgggcaagtccttcaaggaccggaaggagatcgagaagcggcaggaggagaaccggaaggaccgggagaaggccgccgccaagttccgggagtacttccccaacttcgtgggcgagcccaagtccaaggacatcctgaagctgcggctgtacgagcagcagcacggcaagtgcctgtactccggcaaggagatcaacctgggccggctgaacgagaagggctacgtggagatcgacgccgccctgcccttctcccggacctgggacgactccttcaacaacaaggtgctggtgctgggctccgagaaccagaacaagggcaaccagaccccctacgagtacttcaacggcaaggacaactcccgggagtggcaggagttcaaggcccgggtggagacctcccggttcccccggtccaagaagcagcggatcctgctgcagaagttcgacgaggacggcttcaaggagcggaacctgaacgacacccggtacgtgaaccggttcctgtgccagttcgtggccgaccggatgcggctgaccggcaagggcaagaagcgggtgttcgcctccaacggccagatcaccaacctgctgcggggcttctggggcctgcggaaggtgcgggccgagaacgaccggcaccacgccctggacgccgtggtggtggcctgctccaccgtggccatgcagcagaagatcacccggttcgtgcggtacaaggagatgaacgccttcgacggcaagaccatcgacaaggagaccggcgaggtgctgcaccagaagacccacttcccccagccctgggagttcttcgcccaggaggtgatgatccgggtgttcggcaagcccgacggcaagcccgagttcgaggaggccgacaccctggagaagctgcggaccctgctggccgagaagctgtcctcccggcccgaggccgtgcacgagtacgtgacccccctgttcgtgtcccgggcccccaaccggaagatgtccggccagggccacatggagaccgtgaagtccgccaagcggctggacgagggcgtgtccgtgctgcgggtgcccctgacccagctgaagctgaaggacctggagaagatggtgaaccgggagcgggagcccaagctgtacgaggccctgaaggcccggctggaggcccacaaggacgaccccgccaaggccttcgccgagcccttctacaagtacgacaaggccggcaaccggacccagcaggtgaaggccgtgcgggtggagcaggtgcagaagaccggcgtgtgggtgcggaaccacaacggcatcgccgacaacgccaccatggtgcgggtggacgtgttcgagaagggcgacaagtactacctggtgcccatctactcctggcaggtggccaagggcatcctgcccgaccgggccgtggtgcagggcaaggacgaggaggactggcagctgatcgacgactccttcaacttcaagttctccctgcaccccaacgacctggtggaggtgatcaccaagaaggcccggatgttcggctacttcgcctcctgccaccggggcaccggcaacatcaacatccggatccacgacctggaccacaagatcggcaagaacggcatcctggagggcatcggcgtgaagaccgccctgtccttccagaagtaccagatcgacgagctgggcaaggagatccggccctgccggctgaagaagcggccccccgtgcggtga

SEQ ID NO: 247 - RNA, 3249 nt, synthetic construct
  modified_base 2: mod_base = OTHER; note = thymine
  modified_base 10..11: mod_base = OTHER; note = thymine
  modified_base 22: mod_base = OTHER; note = thymine
  modified_base 26: mod_base = OTHER; note = thymine
  modified_base 31: mod_base = OTHER; note = thymine
  modified_base 35: mod_base = OTHER; note = thymine
  modified_base 38: mod_base = OTHER; note = thymine
  modified_base 44: mod_base = OTHER; note = thymine
  modified_base 50: mod_base = OTHER; note = thymine
  modified_base 56: mod_base = OTHER; note = thymine
  modified_base 61: mod_base = OTHER; note = thymine
  modified_base 65: mod_base = OTHER; note = thymine
  modified_base 70: mod_base = OTHER; note = thymine
  modified_base 77: mod_base = OTHER; note = thymine
  modified_base 80: mod_base = OTHER; note = thymine
  modified_base 86: mod_base = OTHER; note = thymine
  modified_base 107: mod_base = OTHER; note = thymine
  modified_base 113: mod_base = OTHER; note = thymine
  modified_base 116: mod_base = OTHER; note = thymine
  modified_base 122: mod_base = OTHER; note = thymine
  modified_base 128: mod_base = OTHER; note = thymine
  modified_base 134: mod_base = OTHER; note = thymine
  modified_base 136..137: mod_base = OTHER; note = thymine
  modified_base 152: mod_base = OTHER; note = thymine
  modified_base 169: mod_base = OTHER; note = thymine
  modified_base 173: mod_base = OTHER; note = thymine
  modified_base 179: mod_base = OTHER; note = thymine
  modified_base 191: mod_base = OTHER; note = thymine
  modified_base 199: mod_base = OTHER; note = thymine
  modified_base 203: mod_base = OTHER; note = thymine
  modified_base 212: mod_base = OTHER; note = thymine
  modified_base 236: mod_base = OTHER; note = thymine
  modified_base 239: mod_base = OTHER; note = thymine
  modified_base 254: mod_base = OTHER; note = thymine
  modified_base 257: mod_base = OTHER; note = thymine
  modified_base 272: mod_base = OTHER; note = thymine
  modified_base 275: mod_base = OTHER; note = thymine
  modified_base 289..290: mod_base = OTHER; note = thymine
  modified_base 305: mod_base = OTHER; note = thymine
  modified_base 308: mod_base = OTHER; note = thymine
  modified_base 313: mod_base = OTHER; note = thymine
  modified_base 317: mod_base = OTHER; note = thymine
  modified_base 331: mod_base = OTHER; note = thymine
  modified_base 338: mod_base = OTHER; note = thymine
  modified_base 353: mod_base = OTHER; note = thymine
  modified_base 365: mod_base = OTHER; note = thymine
  modified_base 374: mod_base = OTHER; note = thymine
  modified_base 379: mod_base = OTHER; note = thymine
  modified_base 382: mod_base = OTHER; note = thymine
  modified_base 389: mod_base = OTHER; note = thymine
  modified_base 392: mod_base = OTHER; note = thymine
  modified_base 395: mod_base = OTHER; note = thymine
  modified_base 401: mod_base = OTHER; note = thymine
  modified_base 404: mod_base = OTHER; note = thymine
  modified_base 418: mod_base = OTHER; note = thymine
  modified_base 422: mod_base = OTHER; note = thymine
  modified_base 424: mod_base = OTHER; note = thymine
  modified_base 464: mod_base = OTHER; note = thymine
  modified_base 473: mod_base = OTHER; note = thymine
  modified_base 476: mod_base = OTHER; note = thymine
  modified_base 485: mod_base = OTHER; note = thymine
  modified_base 506: mod_base = OTHER; note = thymine
  modified_base 520..521: mod_base = OTHER; note = thymine
  modified_base 539: mod_base = OTHER; note = thymine
  modified_base 545: mod_base = OTHER; note = thymine
  modified_base 553..554: mod_base = OTHER; note = thymine
  modified_base 565: mod_base = OTHER; note = thymine
  modified_base 575: mod_base = OTHER; note = thymine
  modified_base 589: mod_base = OTHER; note = thymine
  modified_base 595: mod_base = OTHER; note = thymine
  modified_base 598: mod_base = OTHER; note = thymine
  modified_base 607..608: mod_base = OTHER; note = thymine
  modified_base 610: mod_base = OTHER; note = thymine
  modified_base 623: mod_base = OTHER; note = thymine
  modified_base 635: mod_base = OTHER; note = thymine
  modified_base 638: mod_base = OTHER; note = thymine
  modified_base 641: mod_base = OTHER; note = thymine
  modified_base 644: mod_base = OTHER; note = thymine
  modified_base 646..647: mod_base = OTHER; note = thymine
  modified_base 664..665: mod_base = OTHER; note = thymine
  modified_base 680: mod_base = OTHER; note = thymine
  modified_base 682: mod_base = OTHER; note = thymine
  modified_base 692: mod_base = OTHER; note = thymine
  modified_base 704: mod_base = OTHER; note = thymine
  modified_base 713: mod_base = OTHER; note = thymine
  modified_base 716: mod_base = OTHER; note = thymine
  modified_base 719: mod_base = OTHER; note = thymine
  modified_base 737: mod_base = OTHER; note = thymine
  modified_base 739: mod_base = OTHER; note = thymine
  modified_base 752: mod_base = OTHER; note = thymine
  modified_base 761: mod_base = OTHER; note = thymine
  modified_base 764: mod_base = OTHER; note = thymine
  modified_base 772: mod_base = OTHER; note = thymine
  modified_base 778..779: mod_base = OTHER; note = thymine
  modified_base 814: mod_base = OTHER; note = thymine
  modified_base 829..830: mod_base = OTHER; note = thymine
  modified_base 833: mod_base = OTHER; note = thymine
  modified_base 835: mod_base = OTHER; note = thymine
  modified_base 839: mod_base = OTHER; note = thymine
  modified_base 848: mod_base = OTHER; note = thymine
  modified_base 857: mod_base = OTHER; note = thymine
  modified_base 863: mod_base = OTHER; note = thymine
  modified_base 866: mod_base = OTHER; note = thymine
  modified_base 877: mod_base = OTHER; note = thymine
  modified_base 890: mod_base = OTHER; note = thymine
  modified_base 914: mod_base = OTHER; note = thymine
  modified_base 917: mod_base = OTHER; note = thymine
  modified_base 928: mod_base = OTHER; note = thymine
  modified_base 937: mod_base = OTHER; note = thymine
  modified_base 944: mod_base = OTHER; note = thymine
  modified_base 949: mod_base = OTHER; note = thymine
  modified_base 968: mod_base = OTHER; note = thymine
  modified_base 971: mod_base = OTHER; note = thymine
  modified_base 977: mod_base = OTHER; note = thymine
  modified_base 991..992: mod_base = OTHER; note = thymine
  modified_base 994..995: mod_base = OTHER; note = thymine
  modified_base 1004: mod_base = OTHER; note = thymine
  modified_base 1009: mod_base = OTHER; note = thymine
  modified_base 1033: mod_base = OTHER; note = thymine
  modified_base 1040: mod_base = OTHER; note = thymine
  modified_base 1043: mod_base = OTHER; note = thymine
  modified_base 1049: mod_base = OTHER; note = thymine
  modified_base 1057: mod_base = OTHER; note = thymine
  modified_base 1067: mod_base = OTHER; note = thymine
  modified_base 1069: mod_base = OTHER; note = thymine
  modified_base 1079: mod_base = OTHER; note = thymine
  modified_base 1094: mod_base = OTHER; note = thymine
  modified_base 1108: mod_base = OTHER; note = thymine
  modified_base 1115: mod_base = OTHER; note = thymine
  modified_base 1121: mod_base = OTHER; note = thymine
  modified_base 1123: mod_base = OTHER; note = thymine
  modified_base 1133: mod_base = OTHER; note = thymine
  modified_base 1145: mod_base = OTHER; note = thymine
  modified_base 1156..1157: mod_base = OTHER; note = thymine
  modified_base 1159: mod_base = OTHER; note = thymine
  modified_base 1163: mod_base = OTHER; note = thymine
  modified_base 1165..1166: mod_base = OTHER; note = thymine
  modified_base 1184: mod_base = OTHER; note = thymine
  modified_base 1196: mod_base = OTHER; note = thymine
  modified_base 1208: mod_base = OTHER; note = thymine
  modified_base 1220: mod_base = OTHER; note = thymine
  modified_base 1223: mod_base = OTHER; note = thymine
  modified_base 1232: mod_base = OTHER; note = thymine
  modified_base 1235: mod_base = OTHER; note = thymine
  modified_base 1244: mod_base = OTHER; note = thymine
  modified_base 1246: mod_base = OTHER; note = thymine
  modified_base 1249..1250: mod_base = OTHER; note = thymine
  modified_base 1258..1259: mod_base = OTHER; note = thymine
  modified_base 1262: mod_base = OTHER; note = thymine
  modified_base 1268: mod_base = OTHER; note = thymine
  modified_base 1270: mod_base = OTHER; note = thymine
  modified_base 1274: mod_base = OTHER; note = thymine
  modified_base 1283: mod_base = OTHER; note = thymine
  modified_base 1292: mod_base = OTHER; note = thymine
  modified_base 1295: mod_base = OTHER; note = thymine
  modified_base 1301: mod_base = OTHER; note = thymine
  modified_base 1304: mod_base = OTHER; note = thymine
  modified_base 1321: mod_base = OTHER; note = thymine
  modified_base 1333: mod_base = OTHER; note = thymine
  modified_base 1343: mod_base = OTHER; note = thymine
  modified_base 1345: mod_base = OTHER; note = thymine
  modified_base 1357: mod_base = OTHER; note = thymine
  modified_base 1385: mod_base = OTHER; note = thymine
  modified_base 1387: mod_base = OTHER; note = thymine
  modified_base 1391: mod_base = OTHER; note = thymine
  modified_base 1400: mod_base = OTHER; note = thymine
  modified_base 1415: mod_base = OTHER; note = thymine
  modified_base 1427: mod_base = OTHER; note = thymine
  modified_base 1430: mod_base = OTHER; note = thymine
  modified_base 1433: mod_base = OTHER; note = thymine
  modified_base 1442: mod_base = OTHER; note = thymine
  modified_base 1444: mod_base = OTHER; note = thymine
  modified_base 1460: mod_base = OTHER; note = thymine
  modified_base 1463: mod_base = OTHER; note = thymine
  modified_base 1472: mod_base = OTHER; note = thymine
  modified_base 1475: mod_base = OTHER; note = thymine
  modified_base 1483: mod_base = OTHER; note = thymine
  modified_base 1489: mod_base = OTHER; note = thymine
  modified_base 1502: mod_base = OTHER; note = thymine
  modified_base 1508: mod_base = OTHER; note = thymine
  modified_base 1526: mod_base = OTHER; note = thymine
  modified_base 1534: mod_base = OTHER; note = thymine
  modified_base 1537..1538: mod_base = OTHER; note = thymine
  modified_base 1556: mod_base = OTHER; note = thymine
  modified_base 1609..1610: mod_base = OTHER; note = thymine
  modified_base 1618: mod_base = OTHER; note = thymine
  modified_base 1621..1622: mod_base = OTHER; note = thymine
  modified_base 1630..1631: mod_base = OTHER; note = thymine
  modified_base 1634: mod_base = OTHER; note = thymine
  modified_base 1648: mod_base = OTHER; note = thymine
  modified_base 1658: mod_base = OTHER; note = thymine
  modified_base 1661: mod_base = OTHER; note = thymine
  modified_base 1667: mod_base = OTHER; note = thymine
  modified_base 1673: mod_base = OTHER; note = thymine
  modified_base 1675: mod_base = OTHER; note = thymine
  modified_base 1696: mod_base = OTHER; note = thymine
  modified_base 1700: mod_base = OTHER; note = thymine
  modified_base 1702: mod_base = OTHER; note = thymine
  modified_base 1705: mod_base = OTHER; note = thymine
  modified_base 1718: mod_base = OTHER; note = thymine
  modified_base 1724: mod_base = OTHER; note = thymine
  modified_base 1733: mod_base = OTHER; note = thymine
  modified_base 1747: mod_base = OTHER; note = thymine
  modified_base 1751: mod_base = OTHER; note = thymine
  modified_base 1757: mod_base = OTHER; note = thymine
  modified_base 1769: mod_base = OTHER; note = thymine
  modified_base 1774..1775: mod_base = OTHER; note = thymine
  modified_base 1777: mod_base = OTHER; note = thymine
  modified_base 1786: mod_base = OTHER; note = thymine
  modified_base 1795: mod_base = OTHER; note = thymine
  modified_base 1798..1799: mod_base = OTHER; note = thymine
  modified_base 1811: mod_base = OTHER; note = thymine
  modified_base 1814: mod_base = OTHER; note = thymine
  modified_base 1817: mod_base = OTHER; note = thymine
  modified_base 1820: mod_base = OTHER; note = thymine
  modified_base 1825: mod_base = OTHER; note = thymine
  modified_base 1858: mod_base = OTHER; note = thymine
  modified_base 1864: mod_base = OTHER; note = thymine
  modified_base 1867..1868: mod_base = OTHER; note = thymine
  modified_base 1885: mod_base = OTHER; note = thymine
  modified_base 1894: mod_base = OTHER; note = thymine
  modified_base 1903..1904: mod_base = OTHER; note = thymine
  modified_base 1916: mod_base = OTHER; note = thymine
  modified_base 1924: mod_base = OTHER; note = thymine
  modified_base 1930..1931: mod_base = OTHER; note = thymine
  modified_base 1939: mod_base = OTHER; note = thymine
  modified_base 1955: mod_base = OTHER; note = thymine
  modified_base 1958: mod_base = OTHER; note = thymine
  modified_base 1961: mod_base = OTHER; note = thymine
  modified_base 1969..1970: mod_base = OTHER; note = thymine
  modified_base 1984..1985: mod_base = OTHER; note = thymine
  modified_base 2000: mod_base = OTHER; note = thymine
  modified_base 2014: mod_base = OTHER; note = thymine
  modified_base 2018: mod_base = OTHER; note = thymine
  modified_base 2026..2027: mod_base = OTHER; note = thymine
  modified_base 2030: mod_base = OTHER; note = thymine
  modified_base 2032: mod_base = OTHER; note = thymine
  modified_base 2038..2039: mod_base = OTHER; note = thymine
  modified_base 2042: mod_base = OTHER; note = thymine
  modified_base 2054: mod_base = OTHER; note = thymine
  modified_base 2060: mod_base = OTHER; note = thymine
  modified_base 2084: mod_base = OTHER; note = thymine
  modified_base 2086..2087: mod_base = OTHER; note = thymine
  modified_base 2092: mod_base = OTHER; note = thymine
  modified_base 2105: mod_base = OTHER; note = thymine
  modified_base 2114: mod_base = OTHER; note = thymine
  modified_base 2117: mod_base = OTHER; note = thymine
  modified_base 2125..2126: mod_base = OTHER; note = thymine
  modified_base 2128: mod_base = OTHER; note = thymine
  modified_base 2135: mod_base = OTHER; note = thymine
  modified_base 2144: mod_base = OTHER; note = thymine
  modified_base 2174: mod_base = OTHER; note = thymine
  modified_base 2183: mod_base = OTHER; note = thymine
  modified_base 2186: mod_base = OTHER; note = thymine
  modified_base 2189: mod_base = OTHER; note = thymine
  modified_base 2194: mod_base = OTHER; note = thymine
  modified_base 2197: mod_base = OTHER; note = thymine
  modified_base 2204: mod_base = OTHER; note = thymine
  modified_base 2210: mod_base = OTHER; note = thymine
  modified_base 2222: mod_base = OTHER; note = thymine
  modified_base 2230..2231: mod_base = OTHER; note = thymine
  modified_base 2234: mod_base = OTHER; note = thymine
  modified_base 2239: mod_base = OTHER; note = thymine
  modified_base 2249: mod_base = OTHER; note = thymine
  modified_base 2257..2258: mod_base = OTHER; note = thymine
  modified_base 2273: mod_base = OTHER; note = thymine
  modified_base 2294: mod_base = OTHER; note = thymine
  modified_base 2297: mod_base = OTHER; note = thymine
  modified_base 2314..2315: mod_base = OTHER; note = thymine
  modified_base 2326: mod_base = OTHER; note = thymine
  modified_base 2332..2333: mod_base = OTHER; note = thymine
  modified_base 2335..2336: mod_base = OTHER; note = thymine
  modified_base 2348: mod_base = OTHER; note = thymine
  modified_base 2351: mod_base = OTHER; note = thymine
  modified_base 2354: mod_base = OTHER; note = thymine
  modified_base 2360: mod_base = OTHER; note = thymine
  modified_base 2362..2363: mod_base = OTHER; note = thymine
  modified_base 2389..2390: mod_base = OTHER; note = thymine
  modified_base 2408: mod_base = OTHER; note = thymine
  modified_base 2417: mod_base = OTHER; note = thymine
  modified_base 2426: mod_base = OTHER; note = thymine
  modified_base 2429: mod_base = OTHER; note = thymine
  modified_base 2441: mod_base = OTHER; note = thymine
  modified_base 2443: mod_base = OTHER; note = thymine
  modified_base 2446: mod_base = OTHER; note = thymine
  modified_base 2462: mod_base = OTHER; note = thymine
  modified_base 2470: mod_base = OTHER; note = thymine
  modified_base 2474: mod_base = OTHER; note = thymine
  modified_base 2483: mod_base = OTHER; note = thymine
  modified_base 2485..2486: mod_base = OTHER; note = thymine
  modified_base 2489: mod_base = OTHER; note = thymine
  modified_base 2491: mod_base = OTHER; note = thymine
  modified_base 2513: mod_base = OTHER; note = thymine
  modified_base 2515: mod_base = OTHER; note = thymine
  modified_base 2531: mod_base = OTHER; note = thymine
  modified_base 2540: mod_base = OTHER; note = thymine
  modified_base 2545: mod_base = OTHER; note = thymine
  modified_base 2558: mod_base = OTHER; note = thymine
  modified_base 2570: mod_base = OTHER; note = thymine
  modified_base 2572: mod_base = OTHER; note = thymine
  modified_base 2576: mod_base = OTHER; note = thymine
  modified_base 2579: mod_base = OTHER; note = thymine
  modified_base 2585: mod_base = OTHER; note = thymine
  modified_base 2591: mod_base = OTHER; note = thymine
  modified_base 2600: mod_base = OTHER; note = thymine
  modified_base 2606: mod_base = OTHER; note = thymine
  modified_base 2615: mod_base = OTHER; note = thymine
  modified_base 2624: mod_base = OTHER; note = thymine
  modified_base 2627: mod_base = OTHER; note = thymine
  modified_base 2651: mod_base = OTHER; note = thymine
  modified_base 2653: mod_base = OTHER; note = thymine
  modified_base 2663: mod_base = OTHER; note = thymine
  modified_base 2675: mod_base = OTHER; note = thymine
  modified_base 2707..2708: mod_base = OTHER; note = thymine
  modified_base 2719..2720: mod_base = OTHER; note = thymine
  modified_base 2722: mod_base = OTHER; note = thymine
  modified_base 2728: mod_base = OTHER; note = thymine
  modified_base 2759: mod_base = OTHER; note = thymine
  modified_base 2768: mod_base = OTHER; note = thymine
  modified_base 2774: mod_base = OTHER; note = thymine
  modified_base 2783: mod_base = OTHER; note = thymine
  modified_base 2798: mod_base = OTHER; note = thymine
  modified_base 2800: mod_base = OTHER; note = thymine
  modified_base 2804: mod_base = OTHER; note = thymine
  modified_base 2822: mod_base = OTHER; note = thymine
  modified_base 2840: mod_base = OTHER; note = thymine
  modified_base 2843: mod_base = OTHER; note = thymine
  modified_base 2849: mod_base = OTHER; note = thymine
  modified_base 2855: mod_base = OTHER; note = thymine
  modified_base 2857..2858: mod_base = OTHER; note = thymine
  modified_base 2875: mod_base = OTHER; note = thymine
  modified_base 2878: mod_base = OTHER; note = thymine
  modified_base 2882: mod_base = OTHER; note = thymine
  modified_base 2885: mod_base = OTHER; note = thymine
  modified_base 2891: mod_base = OTHER; note = thymine
  modified_base 2893: mod_base = OTHER; note = thymine
  modified_base 2896: mod_base = OTHER; note = thymine
  modified_base 2899: mod_base = OTHER; note = thymine
  modified_base 2906: mod_base = OTHER; note = thymine
  modified_base 2918: mod_base = OTHER; note = thymine
  modified_base 2921: mod_base = OTHER; note = thymine
  modified_base 2936: mod_base = OTHER; note = thymine
  modified_base 2939: mod_base = OTHER; note = thymine
  modified_base 2962: mod_base = OTHER; note = thymine
  modified_base 2969: mod_base = OTHER; note = thymine
  modified_base 2972: mod_base = OTHER; note = thymine
  modified_base 2980: mod_base = OTHER; note = thymine
  modified_base 2983..2984: mod_base = OTHER; note = thymine
  modified_base 2989..2990: mod_base = OTHER; note = thymine
  modified_base 2995..2996: mod_base = OTHER; note = thymine
  modified_base 2998: mod_base = OTHER; note = thymine
  modified_base 3002: mod_base = OTHER; note = thymine
  modified_base 3017: mod_base = OTHER; note = thymine
  modified_base 3020: mod_base = OTHER; note = thymine
  modified_base 3026: mod_base = OTHER; note = thymine
  modified_base 3029: mod_base = OTHER; note = thymine
  modified_base 3047: mod_base = OTHER; note = thymine
  modified_base 3049..3050: mod_base = OTHER; note = thymine
  modified_base 3055: mod_base = OTHER; note = thymine
  modified_base 3058..3059: mod_base = OTHER; note = thymine
  modified_base 3064: mod_base = OTHER; note = thymine
  modified_base 3067: mod_base = OTHER; note = thymine
  modified_base 3089: mod_base = OTHER; note = thymine
  modified_base 3095: mod_base = OTHER; note = thymine
  modified_base 3101: mod_base = OTHER; note = thymine
  modified_base 3110: mod_base = OTHER; note = thymine
  modified_base 3122: mod_base = OTHER; note = thymine
  modified_base 3137: mod_base = OTHER; note = thymine
  modified_base 3140: mod_base = OTHER; note = thymine
  modified_base 3149: mod_base = OTHER; note = thymine
  modified_base 3155: mod_base = OTHER; note = thymine
  modified_base 3167: mod_base = OTHER; note = thymine
  modified_base 3169: mod_base = OTHER; note = thymine
  modified_base 3172..3173: mod_base = OTHER; note = thymine
  modified_base 3181: mod_base = OTHER; note = thymine
  modified_base 3188: mod_base = OTHER; note = thymine
  modified_base 3197: mod_base = OTHER; note = thymine
  modified_base 3209: mod_base = OTHER; note = thymine
  modified_base 3217: mod_base = OTHER; note = thymine
  modified_base 3224: mod_base = OTHER; note = thymine
  modified_base 3242: mod_base = OTHER; note = thymine
  misc_feature 1..3249: note = Synthetic
  source 1..3249: mol_type = other RNA
atggcagcattcaaaccaaactcaatcaactacatcctaggactagacatcggaatcgcatcagtaggatgagcaatggtagaaatcgacgaagaagaaaacccaatccgactaatcgacctaggagtacgagtattcgaacgagcagaagtaccaaaaacaggagactcactagcaatggcacgacgactagcacgatcagtacgacgactaacacgacgacgagcacaccgactactacgaacacgacgactactaaaacgagaaggagtactacaagcagcaaacttcgacgaaaacggactaatcaaatcactaccaaacacaccatgacaactacgagcagcagcactagaccgaaaactaacaccactagaatgatcagcagtactactacacctaatcaaacaccgaggatacctatcacaacgaaaaaacgaaggagaaacagcagacaaagaactaggagcactactaaaaggagtagcaggaaacgcacacgcactacaaacaggagacttccgaacaccagcagaactagcactaaacaaattcgaaaaagaatcaggacacatccgaaaccaacgatcagactactcacacacattctcacgaaaagacctacaagcagaactaatcctactattcgaaaaacaaaaagaattcggaaacccacacgtatcaggaggactaaaagaaggaatcgaaacactactaatgacacaacgaccagcactatcaggagacgcagtacaaaaaatgctaggacactgcacattcgaaccagcagaaccaaaagcagcaaaaaacacatacacagcagaacgattcatctgactaacaaaactaaacaacctacgaatcctagaacaaggatcagaacgaccactaacagacacagaacgagcaacactaatggacgaaccataccgaaaatcaaaactaacatacgcacaagcacgaaaactactaggactagaagacacagcattcttcaaaggactacgatacggaaaagacaacgcagaagcatcaacactaatggaaatgaaagcataccacgcaatctcacgagcactagaaaaagaaggactaaaagacaaaaaatcaccactaaacctatcaccagaactacaagacgaaatcggaacagcattctcactattcaaaacagacgaagacatcacaggacgactaaaagaccgaatccaaccagaaatcctagaagcactactaaaacacatctcattcgacaaattcgtacaaatctcactaaaagcactacgacgaatcgtaccactaatggaacaaggaaaacgatacgacgaagcatgcgcagaaatctacggagaccactacggaaaaaaaaacacagaagaaaaaatctacctaccaccaatcccagcagacgaaatccgaaacccagtagtactacgagcactatcacaagcacgaaaagtaatcaacggagtagtacgacgatacggatcaccagcacgaatccacatcgaaacagcacgagaagtaggaaaatcattcaaagaccgaaaagaaatcgaaaaacgacaagaagaaaaccgaaaagaccgagaaaaagcagcagcaaaattccgagaatacttcccaaacttcgtaggagaaccaaaatcaaaagacatcctaaaactacgactatacgaacaacaacacggaaaatgcctatactcaggaaaagaaatcaacctaggacgactaaacgaaaaaggatacgtagaaatcgacgcagcactaccattctcacgaacatgagacgactcattcaacaacaaagtactagtactaggatcagaaaaccaaaacaaaggaaaccaaacaccatacgaatacttcaacggaaaagacaactcacgagaatgacaagaattcaaagcacgagtagaaacatcacgattcccacgatcaaaaaaacaacgaatcctactacaaaaattcgacgaagacggattcaaagaacgaaacctaaacgacacacgatacgtaaaccgattcctatgccaattcgtagcagaccgaatgcgactaacaggaaaaggaaaaaaacgagtattcgcatcaaacggacaaatcacaaacctactacgaggattctgaggactacgaaaagtacgagcagaaaacgaccgacaccacgcactagacgcagtagtagtagcatgctcaacagtagcaatgcaacaaaaaatcacacgattcgtacgatacaaagaaatgaacgcattcgacggaaaaacaatcgacaaagaaacaggagaagtactacaccaaaaaacacacttcccacaaccatgagaattcttcgcacaagaagtaatgatccgagtattcggaaaaccagacggaaaaccagaattcgaagaagcagacacactagaaaaactacgaacactactagcagaaaaactatcatcacgaccagaagcagtacacgaatacgtaacaccactattcgtatcacgagcaccaaaccgaaaaatgtcaggacaaggacacatggaaacagtaaaatcagcaaaacgactagacgaaggagtatcagtactacgagtaccactaacacaactaaaactaaaagacctagaaaaaatggtaaaccgagaacgagaaccaaaactatacgaagcactaaaagcacgactagaagcacacaaagacgacccagcaaaagcattcgcagaaccattctacaaatacgacaaagcaggaaaccgaacacaacaagtaaaagcagtacgagtagaacaagtacaaaaaacaggagtatgagtacgaaaccacaacggaatcgcagacaacgcaacaatggtacgagtagacgtattcgaaaaaggagacaaatactacctagtaccaatctactcatgacaagtagcaaaaggaatcctaccagaccgagcagtagtacaaggaaaagacgaagaagactgacaactaatcgacgactcattcaacttcaaattctcactacacccaaacgacctagtagaagtaatcacaaaaaaagcacgaatgttcggatacttcgcatcatgccaccgaggaacaggaaacatcaacatccgaatccacgacctagaccacaaaatcggaaaaaacggaatcctagaaggaatcggagtaaaaacagcactatcattccaaaaataccaaatcgacgaactaggaaaagaaatccgaccatgccgactaaaaaaacgaccaccagtacgataa

SEQ ID NO: 248 - protein, 1082 aa, synthetic construct; identical to SEQ ID NO: 6
  REGION 1..1082: note = Synthetic

SEQ ID NO: 249 - DNA, 3243 bp, synthetic construct
  misc_feature 1..3243: note = Synthetic
  source 1..3243: mol_type = other DNA
gctgcttttaagcctaatcctattaattatattcttggtcttgatattggtattgcttctgttggttgggctatggttgagattgatgaggaggagaatcctattcgtcttattgatcttggtgttcgtgtttttgagcgtgctgaggttcctaagactggtgattctcttgctatggctcgtcgtcttgctcgttctgttcgtcgtcttactcgtcgtcgtgctcatcgtcttcttcgtgctcgtcgtcttcttaagcgtgagggtgttcttcaggctgctgattttgatgagaatggtcttattaagtctcttcctaatactccttggcagcttcgtgctgctgctcttgatcgtaagcttactcctcttgagtggtctgctgttcttcttcatcttattaagcatcgtggttatctttctcagcgtaagaatgagggtgagactgctgataaggagcttggtgctcttcttaagggtgttgctaataatgctcatgctcttcagactggtgattttcgtactcctgctgagcttgctcttaataagtttgagaaggagtctggtcatattcgtaatcagcgtggtgattattctcatactttttctcgtaaggatcttcaggctgagcttattcttctttttgagaagcagaaggagtttggtaatcctcatgtttctggtggtcttaaggagggtattgagactcttcttatgactcagcgtcctgctctttctggtgatgctgttcagaagatgcttggtcattgtacttttgagcctgctgagcctaaggctgctaagaatacttatactgctgagcgttttatttggcttactaagcttaataatcttcgtattcttgagcagggttctgagcgtcctcttactgatactgagcgtgctactcttatggatgagccttatcgtaagtctaagcttacttatgctcaggctcgtaagcttcttggtcttgaggatactgctttttttaagggtcttcgttatggtaaggataatgctgaggcttctactcttatggagatgaaggcttatcatgctatttctcgtgctcttgagaaggagggtcttaaggataagaagtctcctcttaatctttcttctgagcttcaggatgagattggtactgctttttctctttttaagactgatgaggatattactggtcgtcttaaggatcgtgttcagcctgagattcttgaggctcttcttaagcatatttcttttgataagtttgttcagatttctcttaaggctcttcgtcgtattgttcctcttatggagcagggtaagcgttatgatgaggcttgtgctgagatttatggtgatcattatggtaagaagaatactgaggagaagatttatcttcctcctattcctgctgatgagattcgtaatcctgttgttcttcgtgctctttctcaggctcgtaaggttattaatggtgttgttcgtcgttatggttctcctgctcgtattcatattgagactgctcgtgaggttggtaagtcttttaaggatcgtaaggagattgagaagcgtcaggaggagaatcgtaaggatcgtgagaaggctgctgctaagtttcgtgagtattttcctaattttgttggtgagcctaagtctaaggatattcttaagcttcgtctttatgagcagcagcatggtaagtgtctttattctggtaaggagattaatcttgttcgtcttaatgagaagggttatgttgagattgatcatgctcttcctttttctcgtacttgggatgattcttttaataataaggttcttgttcttggttctgagaatcagaataagggtaatcagactccttatgagtattttaatggtaaggataattctcgtgagtggcaggagtttaaggctcgtgttgagacttctcgttttcctcgttctaagaagcagcgtattcttcttcagaagtttgatgaggatggttttaaggagtgtaatcttaatgatactcgttatgttaatcgttttctttgtcagtttgttgctgatcatattcttcttactggtaagggtaagcgtcgtgtttttgcttctaatggtcagattactaatcttcttcgtggtttttggggtcttcgtaaggttcgtgctgagaatgatcgtcatcatgctcttgatgctgttgttgttgcttgttctactgttgctatgcagcagaagattactcgttttgttcgttataaggagatgaatgcttttgatggtaagactattgataaggagactggtaaggttcttcatcagaagactcattttcctcagccttgggagttttttgctcaggaggttatgattcgtgtttttggtaagcctgatggtaagcctgagtttgaggaggctgatactcctgagaagcttcgtactcttcttgctgagaagctttcttctcgtcctgaggctgttcatgagtatgttactcctctttttgtttctcgtgctcctaatcgtaagatgtctggtgctcataaggatactcttcgttctgctaagcgttttgttaagcataatgagaagatttctgttaagcgtgtttggcttactgagattaagcttgctgatcttgagaatatggttaattataagaatggtcgtgagattgagctttatgaggctcttaaggctcgtcttgaggcttatggtggtaatgctaagcaggcttttgatcctaaggataatcctttttataagaagggtggtcagcttgttaaggctgttcgtgttgagaagactcaggagtctggtgttcttcttaataagaagaatgcttatactattgctgataatggtgatatggttcgtgttgatgttttttgtaaggttgataagaagggtaagaatcagtattttattgttcctatttatgcttggcaggttgctgagaatattcttcctgatattgattgtaagggttatcgtattgatgattcttatactttttgtttttctcttcataagtatgatcttattgcttttcagaaggatgagaagtctaaggttgagtttgcttattatattaattgtgattcttctaatggtcgtttttatcttgcttggcatgataagggttctaaggagcagcagtttcgtatttctactcagaatcttgttcttattcagaagtatcaggttaatgagcttggtaaggagattcgtccttgtcgtcttaagaagcgtcctcctgttcgt

SEQ ID NO: 250 - DNA, 3243 bp, synthetic construct
  misc_feature 1..3243: note = Synthetic
  source 1..3243: mol_type = other DNA
gccgccttcaagcccaaccccatcaactacatcctgggcctggacatcggcatcgcctccgtgggctgggccatggtggagatcgacgaggaggagaaccccatccggctgatcgacctgggcgtgcgggtgttcgagcgggccgaggtgcccaagaccggcgactccctggccatggcccggcggctggcccggtccgtgcggcggctgacccggcggcgggcccaccggctgctgcgggcccggcggctgctgaagcgggagggcgtgctgcaggccgccgacttcgacgagaacggcctgatcaagtccctgcccaacaccccctggcagctgcgggccgccgccctggaccggaagctgacccccctggagtggtccgccgtgctgctgcacctgatcaagcaccggggctacctgtcccagcggaagaacgagggcgagaccgccgacaaggagctgggcgccctgctgaagggcgtggccaacaacgcccacgccctgcagaccggcgacttccggacccccgccgagctggccctgaacaagttcgagaaggagtccggccacatccggaaccagcggggcgactactcccacaccttctcccggaaggacctgcaggccgagctgatcctgctgttcgagaagcagaaggagttcggcaacccccacgtgtccggcggcctgaaggagggcatcgagaccctgctgatgacccagcggcccgccctgtccggcgacgccgtgcagaagatgctgggccactgcaccttcgagcccgccgagcccaaggccgccaagaacacctacaccgccgagcggttcatctggctgaccaagctgaacaacctgcggatcctggagcagggctccgagcggcccctgaccgacaccgagcgggccaccctgatggacgagccctaccggaagtccaagctgacctacgcccaggcccggaagctgctgggcctggaggacaccgccttcttcaagggcctgcggtacggcaaggacaacgccgaggcctccaccctgatggagatgaaggcctaccacgccatctcccgggccctggagaaggagggcctgaaggacaagaagtcccccctgaacctgtcctccgagctgcaggacgagatcggcaccgccttctccctgttcaagaccgacgaggacatcaccggccggctgaaggaccgggtgcagcccgagatcctggaggccctgctgaagcacatctccttcgacaagttcgtgcagatctccctgaaggccctgcggcggatcgtgcccctgatggagcagggcaagcggtacgacgaggcctgcgccgagatctacggcgaccactacggcaagaagaacaccgaggagaagatctacctgccccccatccccgccgacgagatccggaaccccgtggtgctgcgggccctgtcccaggcccggaaggtgatcaacggcgtggtgcggcggtacggctcccccgcccggatccacatcgagaccgcccgggaggtgggcaagtccttcaaggaccggaaggagatcgagaagcggcaggaggagaaccggaaggaccgggagaaggccgccgccaagttccgggagtacttccccaacttcgtgggcgagcccaagtccaaggacatcctgaagctgcggctgtacgagcagcagcacggcaagtgcctgtactccggcaaggagatcaacctggtgcggctgaacgagaagggctacgtggagatcgaccacgccctgcccttctcccggacctgggacgactccttcaacaacaaggtgctggtgctgggctccgagaaccagaacaagggcaaccagaccccctacgagtacttcaacggcaaggacaactcccgggagtggcaggagttcaaggcccgggtggagacctcccggttcccccggtccaagaagcagcggatcctgctgcagaagttcgacgaggacggcttcaaggagtgcaacctgaacgacacccggtacgtgaaccggttcctgtgccagttcgtggccgaccacatcctgctgaccggcaagggcaagcggcgggtgttcgcctccaacggccagatcaccaacctgctgcggggcttctggggcctgcggaaggtgcgggccgagaacgaccggcaccacgccctggacgccgtggtggtggcctgctccaccgtggccatgcagcagaagatcacccggttcgtgcggtacaaggagatgaacgccttcgacggcaagaccatcgacaaggagaccggcaaggtgctgcaccagaagacccacttcccccagccctgggagttcttcgcccaggaggtgatgatccgggtgttcggcaagcccgacggcaagcccgagttcgaggaggccgacacccccgagaagctgcggaccctgctggccgagaagctgtcctcccggcccgaggccgtgcacgagtacgtgacccccctgttcgtgtcccgggcccccaaccggaagatgtccggcgcccacaaggacaccctgcggtccgccaagcggttcgtgaagcacaacgagaagatctccgtgaagcgggtgtggctgaccgagatcaagctggccgacctggagaacatggtgaactacaagaacggccgggagatcgagctgtacgaggccctgaaggcccggctggaggcctacggcggcaacgccaagcaggccttcgaccccaaggacaaccccttctacaagaagggcggccagctggtgaaggccgtgcgggtggagaagacccaggagtccggcgtgctgctgaacaagaagaacgcctacaccatcgccgacaacggcgacatggtgcgggtggacgtgttctgcaaggtggacaagaagggcaagaaccagtacttcatcgtgcccatctacgcctggcaggtggccgagaacatcctgcccgacatcgactgcaagggctaccggatcgacgactcctacaccttctgcttctccctgcacaagtacgacctgatcgccttccagaaggacgagaagtccaaggtggagttcgcctactacatcaactgcgactcctccaacggccggttctacctggcctggcacgacaagggctccaaggagcagcagttccggatctccacccagaacctggtgctgatccagaagtaccaggtgaacgagctgggcaaggagatccggccctgccggctgaagaagcggccccccgtgcgg

SEQ ID NO: 251 - DNA, 3243 bp, synthetic construct
  misc_feature 1..3243: note = Synthetic
  source 1..3243: mol_type = other DNA
gcagcattcaaaccaaacccaatcaactacatcctaggactagacatcggaatcgcatcagtaggatgagcaatggtagaaatcgacgaagaagaaaacccaatccgactaatcgacctaggagtacgagtattcgaacgagcagaagtaccaaaaacaggagactcactagcaatggcacgacgactagcacgatcagtacgacgactaacacgacgacgagcacaccgactactacgagcacgacgactactaaaacgagaaggagtactacaagcagcagacttcgacgaaaacggactaatcaaatcactaccaaacacaccatgacaactacgagcagcagcactagaccgaaaactaacaccactagaatgatcagcagtactactacacctaatcaaacaccgaggatacctatcacaacgaaaaaacgaaggagaaacagcagacaaagaactaggagcactactaaaaggagtagcaaacaacgcacacgcactacaaacaggagacttccgaacaccagcagaactagcactaaacaaattcgaaaaagaatcaggacacatccgaaaccaacgaggagactactcacacacattctcacgaaaagacctacaagcagaactaatcctactattcgaaaaacaaaaagaattcggaaacccacacgtatcaggaggactaaaagaaggaatcgaaacactactaatgacacaacgaccagcactatcaggagacgcagtacaaaaaatgctaggacactgcacattcgaaccagcagaaccaaaagcagcaaaaaacacatacacagcagaacgattcatctgactaacaaaactaaacaacctacgaatcctagaacaaggatcagaacgaccactaacagacacagaacgagcaacactaatggacgaaccataccgaaaatcaaaactaacatacgcacaagcacgaaaactactaggactagaagacacagcattcttcaaaggactacgatacggaaaagacaacgcagaagcatcaacactaatggaaatgaaagcataccacgcaatctcacgagcactagaaaaagaaggactaaaagacaaaaaatcaccactaaacctatcatcagaactacaagacgaaatcggaacagcattctcactattcaaaacagacgaagacatcacaggacgactaaaagaccgagtacaaccagaaatcctagaagcactactaaaacacatctcattcgacaaattcgtacaaatctcactaaaagcactacgacgaatcgtaccactaatggaacaaggaaaacgatacgacgaagcatgcgcagaaatctacggagaccactacggaaaaaaaaacacagaagaaaaaatctacctaccaccaatcccagcagacgaaatccgaaacccagtagtactacgagcactatcacaagcacgaaaagtaatcaacggagtagtacgacgatacggatcaccagcacgaatccacatcgaaacagcacgagaagtaggaaaatcattcaaagaccgaaaagaaatcgaaaaacgacaagaagaaaaccgaaaagaccgagaaaaagcagcagcaaaattccgagaatacttcccaaacttcgtaggagaaccaaaatcaaaagacatcctaaaactacgactatacgaacaacaacacggaaaatgcctatactcaggaaaagaaatcaacctagtacgactaaacgaaaaaggatacgtagaaatcgaccacgcactaccattctcacgaacatgagacgactcattcaacaacaaagtactagtactaggatcagaaaaccaaaacaaaggaaaccaaacaccatacgaatacttcaacggaaaagacaactcacgagaatgacaagaattcaaagcacgagtagaaacatcacgattcccacgatcaaaaaaacaacgaatcctactacaaaaattcgacgaagacggattcaaagaatgcaacctaaacgacacacgatacgtaaaccgattcctatgccaattcgtagcagaccacatcctactaacaggaaaaggaaaacgacgagtattcgcatcaaacggacaaatcacaaacctactacgaggattctgaggactacgaaaagtacgagcagaaaacgaccgacaccacgcactagacgcagtagtagtagcatgctcaacagtagcaatgcaacaaaaaatcacacgattcgtacgatacaaagaaatgaacgcattcgacggaaaaacaatcgacaaagaaacaggaaaagtactacaccaaaaaacacacttcccacaaccatgagaattcttcgcacaagaagtaatgatccgagtattcggaaaaccagacggaaaaccagaattcgaagaagcagacacaccagaaaaactacgaacactactagcagaaaaactatcatcacgaccagaagcagtacacgaatacgtaacaccactattcgtatcacgagcaccaaaccgaaaaatgtcaggagcacacaaagacacactacgatcagcaaaacgattcgtaaaacacaacgaaaaaatctcagtaaaacgagtatgactaacagaaatcaaactagcagacctagaaaacatggtaaactacaaaaacggacgagaaatcgaactatacgaagcactaaaagcacgactagaagcatacggaggaaacgcaaaacaagcattcgacccaaaagacaacccattctacaaaaaaggaggacaactagtaaaagcagtacgagtagaaaaaacacaagaatcaggagtactactaaacaaaaaaaacgcatacacaatcgcagacaacggagacatggtacgagtagacgtattctgcaaagtagacaaaaaaggaaaaaaccaatacttcatcgtaccaatctacgcatgacaagtagcagaaaacatcctaccagacatcgactgcaaaggataccgaatcgacgactcatacacattctgcttctcactacacaaatacgacctaatcgcattccaaaaagacgaaaaatcaaaagtagaattcgcatactacatcaactgcgactcatcaaacggacgattctacctagcatgacacgacaaaggatcaaaagaacaacaattccgaatctcaacacaaaacctagtactaatccaaaaataccaagtaaacgaactaggaaaagaaatccgaccatgccgactaaaaaaacgaccaccagtacga

SEQ ID NO: 252 - RNA, 3249 nt, synthetic construct
  modified_base 2: mod_base = OTHER; note = thymine
  modified_base 6: mod_base = OTHER; note = thymine
  modified_base 9..12: mod_base = OTHER; note = thymine
  modified_base 18: mod_base = OTHER; note = thymine
  modified_base 21: mod_base = OTHER; note = thymine
  modified_base 24: mod_base = OTHER; note = thymine
  modified_base 26..27: mod_base = OTHER; note = thymine
  modified_base 30..31: mod_base = OTHER; note = thymine
  modified_base 33: mod_base = OTHER; note = thymine
  modified_base 35..36: mod_base = OTHER; note = thymine
  modified_base 38..39: mod_base = OTHER; note = thymine
  modified_base 42: mod_base = OTHER; note = thymine
  modified_base 44..45: mod_base = OTHER; note = thymine
  modified_base 48: mod_base = OTHER; note = thymine
  modified_base 50..51: mod_base = OTHER; note = thymine
  modified_base 54: mod_base = OTHER; note = thymine
  modified_base 56..57: mod_base = OTHER; note = thymine
  modified_base 60..61: mod_base = OTHER; note = thymine
  modified_base 63: mod_base = OTHER; note = thymine
  modified_base 65..66: mod_base = OTHER; note = thymine
  modified_base 69..70: mod_base = OTHER; note = thymine
  modified_base 75: mod_base = OTHER; note = thymine
  modified_base 77: mod_base = OTHER; note = thymine
  modified_base 80..81: mod_base = OTHER; note = thymine
  modified_base 86..87: mod_base = OTHER; note = thymine
  modified_base 90: mod_base = OTHER; note = thymine
  modified_base 102: mod_base = OTHER; note = thymine
  modified_base 105: mod_base = OTHER; note = thymine
  modified_base 107..108: mod_base = OTHER; note = thymine
  modified_base 111: mod_base = OTHER; note = thymine
  modified_base 113..114: mod_base = OTHER; note = thymine
  modified_base 116..117: mod_base = OTHER; note = thymine
  modified_base 120: mod_base = OTHER; note = thymine
  modified_base 122..123: mod_base = OTHER; note = thymine
  modified_base 126: mod_base = OTHER; note = thymine
  modified_base 128..129: mod_base = OTHER; note = thymine
  modified_base 132: mod_base = OTHER; note = thymine
  modified_base 134..138: mod_base = OTHER; note = thymine
  modified_base 144: mod_base = OTHER; note = thymine
  modified_base 147: mod_base = OTHER; note = thymine
  modified_base 152..153: mod_base = OTHER; note = thymine
  modified_base 156: mod_base = OTHER; note = thymine
  modified_base 162: mod_base = OTHER; note = thymine
  modified_base 165: mod_base = OTHER; note = thymine
  modified_base 168..169: mod_base = OTHER; note = thymine
  modified_base 171: mod_base = OTHER; note = thymine
  modified_base 173..174: mod_base = OTHER; note = thymine
  modified_base 177: mod_base = OTHER; note = thymine
  modified_base 179: mod_base = OTHER; note = thymine
  modified_base 183: mod_base = OTHER; note = thymine
  modified_base 186: mod_base = OTHER; note = thymine
  modified_base 189: mod_base = OTHER; note = thymine
  modified_base 191..192: mod_base = OTHER; note = thymine
  modified_base 195: mod_base = OTHER; note = thymine
  modified_base 198..199: mod_base = OTHER; note = thymine
  modified_base 201: mod_base = OTHER; note = thymine
  modified_base 203..204: mod_base = OTHER; note = thymine
  modified_base 207: mod_base = OTHER; note = thymine
  modified_base 210: mod_base = OTHER; note = thymine
  modified_base 212..213: mod_base = OTHER; note = thymine
  modified_base 216: mod_base = OTHER; note = thymine
  modified_base 219: mod_base = OTHER; note = thymine
  modified_base 222: mod_base = OTHER; note = thymine
  modified_base 225: mod_base = OTHER; note = thymine
  modified_base 228: mod_base = OTHER; note = thymine
  modified_base 231: mod_base = OTHER; note = thymine
  modified_base 234: mod_base = OTHER; note = thymine
  modified_base 236..237: mod_base = OTHER; note = thymine
  modified_base 239..240: mod_base = OTHER; note = thymine
  modified_base 243: mod_base = OTHER; note = thymine
  modified_base 246: mod_base = OTHER; note = thymine
  modified_base 249: mod_base = OTHER; note = thymine
  modified_base 252: mod_base = OTHER; note = thymine
  modified_base 254..255: mod_base = OTHER; note = thymine
  modified_base 257..258: mod_base = OTHER; note = thymine
  modified_base 264: mod_base = OTHER; note = thymine
  modified_base 270: mod_base = OTHER; note = thymine
  modified_base 272..273: mod_base = OTHER; note = thymine
  modified_base 275..276: mod_base = OTHER; note = thymine
  modified_base 282: mod_base = OTHER; note = thymine
  modified_base 285: mod_base = OTHER; note = thymine
  modified_base 288..291: mod_base = OTHER; note = thymine
  modified_base 294: mod_base = OTHER; note = thymine
  modified_base 300: mod_base = OTHER; note = thymine
  modified_base 303: mod_base = OTHER; note = thymine
  modified_base 305..306: mod_base = OTHER; note = thymine
  modified_base 308..309: mod_base = OTHER; note = thymine
  modified_base 313: mod_base = OTHER; note = thymine
  modified_base 315: mod_base = OTHER; note = thymine
  modified_base 317..318: mod_base = OTHER; note = thymine
  modified_base 321: mod_base = OTHER; note = thymine
  modified_base 324: mod_base = OTHER; note = thymine
  modified_base 327: mod_base = OTHER; note = thymine
  modified_base 330..331: mod_base = OTHER; note = thymine
  modified_base 338..339: mod_base = OTHER; note = thymine
  modified_base 342: mod_base = OTHER; note = thymine
  modified_base 345: mod_base = OTHER; note = thymine
  modified_base 348: mod_base = OTHER; note = thymine
  modified_base 351: mod_base = OTHER; note = thymine
  modified_base 353..354: mod_base = OTHER; note = thymine
  modified_base 357: mod_base = OTHER; note = thymine
  modified_base 360: mod_base = OTHER; note = thymine
  modified_base 365..366: mod_base = OTHER; note = thymine
  modified_base 369: mod_base = OTHER; note = thymine
  modified_base 372: mod_base = OTHER; note = thymine
  modified_base 374..375: mod_base = OTHER; note = thymine
  modified_base 379: mod_base = OTHER; note = thymine
  modified_base 382: mod_base = OTHER; note = thymine
  modified_base 384: mod_base = OTHER; note = thymine
  modified_base 387: mod_base = OTHER; note = thymine
  modified_base 389..390: mod_base = OTHER; note = thymine
  modified_base 392..393: mod_base = OTHER; note = thymine
  modified_base 395..396: mod_base = OTHER; note = thymine
  modified_base 399: mod_base = OTHER; note = thymine
  modified_base 401..402: mod_base = OTHER; note = thymine
  modified_base 404..405: mod_base = OTHER; note = thymine
  modified_base 411: mod_base = OTHER; note = thymine
  modified_base 414: mod_base = OTHER; note = thymine
  modified_base 417..418: mod_base = OTHER; note = thymine
  modified_base 420: mod_base = OTHER; note = thymine
  modified_base 422..424: mod_base = OTHER; note = thymine
  modified_base 426: mod_base = OTHER; note = thymine
  modified_base 432: mod_base = OTHER; note = thymine
  modified_base 438: mod_base = OTHER; note = thymine
  modified_base 444: mod_base = OTHER; note = thymine
  modified_base 450: mod_base = OTHER; note = thymine
  modified_base 453: mod_base = OTHER; note = thymine
  modified_base 456: mod_base = OTHER; note = thymine
  modified_base 464..465: mod_base = OTHER; note = thymine
  modified_base 468: mod_base = OTHER; note = thymine
  modified_base 471: mod_base = OTHER; note = thymine
  modified_base 473..474: mod_base = OTHER; note = thymine
  modified_base 476..477: mod_base = OTHER; note = thymine
  modified_base 483: mod_base = OTHER; note = thymine
  modified_base 485..486: mod_base = OTHER; note = thymine
  modified_base 489: mod_base = OTHER; note = thymine
  modified_base 492: mod_base = OTHER; note = thymine
  modified_base 495: mod_base = OTHER; note = thymine
  modified_base 498: mod_base = OTHER; note = thymine
  modified_base 501: mod_base = OTHER; note = thymine
  modified_base 504: mod_base = OTHER; note = thymine
  modified_base 506..507: mod_base = OTHER; note = thymine
  modified_base 513: mod_base = OTHER; note = thymine
  modified_base 516: mod_base = OTHER; note = thymine
  modified_base 519..522: mod_base = OTHER; note = thymine
  modified_base 525: mod_base = OTHER; note = thymine
  modified_base 528: mod_base = OTHER; note = thymine
  modified_base 531: mod_base = OTHER; note = thymine
  modified_base 534: mod_base = OTHER; note = thymine
  modified_base 539..540: mod_base = OTHER; note = thymine
  modified_base 543: mod_base = OTHER; note = thymine
  modified_base 545..546: mod_base = OTHER; note = thymine
  modified_base 549: mod_base = OTHER; note = thymine
  modified_base 553..555: mod_base = OTHER; note = thymine
  modified_base 565: mod_base = OTHER; note = thymine
  modified_base 567: mod_base = OTHER; note = thymine
  modified_base 570: mod_base = OTHER; note = thymine
  modified_base 573: mod_base = OTHER; note = thymine
  modified_base 575..576: mod_base = OTHER; note = thymine
  modified_base 579: mod_base = OTHER; note = thymine
  modified_base 582: mod_base = OTHER; note = thymine
  modified_base 588: mod_base = OTHER; note = thymine
  modified_base 591: mod_base = OTHER; note = thymine
  modified_base 594..595: mod_base = OTHER; note = thymine
  modified_base 597..598: mod_base = OTHER; note = thymine
  modified_base 600: mod_base = OTHER; note = thymine
  modified_base 603: mod_base = OTHER; note = thymine
  modified_base 606..610: mod_base = OTHER; note = thymine
  modified_base 612: mod_base = OTHER; note = thymine
  modified_base 615: mod_base = OTHER; note = thymine
  modified_base 621: mod_base = OTHER; note = thymine
  modified_base 623..624: mod_base = OTHER; note = thymine
  modified_base 630: mod_base = OTHER; note = thymine
  modified_base 635..636: mod_base = OTHER; note = thymine
  modified_base 638..639: mod_base = OTHER; note = thymine
  modified_base 641..642: mod_base = OTHER; note = thymine
  modified_base 644..648: mod_base = OTHER; note = thymine
  modified_base 664..666: mod_base = OTHER; note = thymine
  modified_base 669: mod_base = OTHER; note = thymine
  modified_base 672: mod_base = OTHER; note = thymine
  modified_base 675: mod_base = OTHER; note = thymine
  modified_base 678: mod_base = OTHER; note = thymine
  modified_base 680..682: mod_base = OTHER; note = thymine
  modified_base 684: mod_base = OTHER; note = thymine
  modified_base 687: mod_base = OTHER; note = thymine
  modified_base 690: mod_base = OTHER; note = thymine
  modified_base 692..693: mod_base = OTHER; note = thymine
  modified_base 702: mod_base = OTHER; note = thymine
  modified_base 704..705: mod_base = OTHER; note = thymine
  modified_base 711: mod_base = OTHER; note = thymine
  modified_base 713..714: mod_base = OTHER; note = thymine
  modified_base 716..717: mod_base = OTHER; note = thymine
  modified_base 719: mod_base = OTHER; note = thymine
  modified_base 723: mod_base = OTHER; note = thymine
  modified_base 729: mod_base = OTHER; note = thymine
  modified_base 732: mod_base = OTHER; note = thymine
  modified_base 735: mod_base = OTHER; note = thymine
  modified_base 737..739: mod_base = OTHER; note = thymine
  modified_base 741: mod_base = OTHER; note = thymine
  modified_base 744: mod_base = OTHER; note = thymine
  modified_base 747: mod_base = OTHER; note = thymine
  modified_base 750: mod_base = OTHER; note = thymine
  modified_base 752..753: mod_base = OTHER; note = thymine
  modified_base 761: mod_base = OTHER; note = thymine
  modified_base 764..765: mod_base = OTHER; note = thymine
  modified_base 768: mod_base = OTHER; note = thymine
  modified_base 771..772: mod_base = OTHER; note = thymine
  modified_base 774: mod_base = OTHER; note = thymine
  modified_base 777..780: mod_base = OTHER; note = thymine
  modified_base 786: mod_base = OTHER; note = thymine
  modified_base 789: mod_base = OTHER; note = thymine
  modified_base 795: mod_base = OTHER; note = thymine
  modified_base 801: mod_base = OTHER; note = thymine
  modified_base 804: mod_base = OTHER; note = thymine
  modified_base 810: mod_base = OTHER; note = thymine
  modified_base 813..814: mod_base = OTHER; note = thymine
  modified_base 816: mod_base = OTHER; note = thymine
  modified_base 819: mod_base = OTHER; note = thymine
  modified_base 822: mod_base = OTHER; note = thymine
  modified_base 828..831: mod_base = OTHER; note = thymine
  modified_base 833..835: mod_base = OTHER; note = thymine
  modified_base 839..840: mod_base = OTHER; note = thymine
  modified_base 843: mod_base = OTHER; note = thymine
  modified_base 848..849: mod_base = OTHER; note = thymine
  modified_base 852: mod_base = OTHER; note = thymine
  modified_base 855: mod_base = OTHER; note = thymine
  modified_base 857..858: mod_base = OTHER; note = thymine
  modified_base 861: mod_base = OTHER; note = thymine
  modified_base 863..864: mod_base = OTHER; note = thymine
  modified_base 866..867: mod_base = OTHER; note = thymine
  modified_base 876..877: mod_base = OTHER; note = thymine
  modified_base 879: mod_base = OTHER; note = thymine
  modified_base 885: mod_base = OTHER; note = thymine
  modified_base 888: mod_base = OTHER; note = thymine
  modified_base 890..891: mod_base = OTHER; note = thymine
  modified_base 894: mod_base = OTHER; note = thymine
  modified_base 897: mod_base = OTHER; note = thymine
  modified_base 900: mod_base = OTHER; note = thymine
  modified_base 906: mod_base = OTHER; note = thymine
  modified_base 909: mod_base = OTHER; note = thymine
  modified_base 912: mod_base = OTHER; note = thymine
  modified_base 914..915: mod_base = OTHER; note = thymine
  modified_base 917: mod_base = OTHER; note = thymine
  modified_base 921: mod_base = OTHER; note = thymine
  modified_base 927..928: mod_base = OTHER; note = thymine
  modified_base 930: mod_base = OTHER; note = thymine
  modified_base 933: mod_base = OTHER; note = thymine
  modified_base 937: mod_base = OTHER; note = thymine
  modified_base 939: mod_base = OTHER; note = thymine
  modified_base 944..945: mod_base = OTHER; note = thymine
  modified_base 948..949: mod_base = OTHER; note = thymine
  modified_base 951: mod_base = OTHER; note = thymine
  modified_base 954: mod_base = OTHER; note = thymine
  modified_base 960: mod_base = OTHER; note = thymine
  modified_base 963: mod_base = OTHER; note = thymine
  modified_base 968..969: mod_base = OTHER; note = thymine
  modified_base 971..972: mod_base = OTHER; note = thymine
  modified_base 975: mod_base = OTHER; note = thymine
  modified_base 977..978: mod_base = OTHER; note = thymine
  modified_base 984: mod_base = OTHER; note = thymine
  modified_base 987: mod_base = OTHER; note = thymine
  modified_base 990..996: mod_base = OTHER; note = thymine
  modified_base 1002: mod_base = OTHER; note = thymine
  modified_base 1004..1005: mod_base = OTHER; note = thymine
  modified_base 1008..1009: mod_base = OTHER; note = thymine
  modified_base 1011: mod_base = OTHER; note = thymine
  modified_base 1014: mod_base = OTHER; note = thymine
  modified_base 1020: mod_base = OTHER; note = thymine
  modified_base 1023: mod_base = OTHER; note = thymine
  modified_base 1026: mod_base = OTHER; note = thymine
  modified_base 1032..1033: mod_base = OTHER; note = thymine
  modified_base 1035: mod_base = OTHER; note = thymine
  modified_base 1038: mod_base = OTHER; note = thymine
  modified_base 1040..1041: mod_base = OTHER; note = thymine
  modified_base 1043: mod_base = OTHER; note = thymine
  modified_base 1049: mod_base = OTHER; note = thymine
  modified_base 1056..1057: mod_base = OTHER; note = thymine
  modified_base 1059: mod_base = OTHER; note = thymine
  modified_base 1062: mod_base = OTHER; note = thymine
  modified_base 1065: mod_base = OTHER; note = thymine
  modified_base 1067..1069: mod_base = OTHER; note = thymine
  modified_base 1071: mod_base = OTHER; note = thymine
  modified_base 1074: mod_base = OTHER; note = thymine
  modified_base 1077: mod_base = OTHER; note = thymine
  modified_base 1079..1080: mod_base = OTHER; note = thymine
  modified_base 1092: mod_base = OTHER; note = thymine
  modified_base 1094..1095: mod_base = OTHER; note = thymine
  modified_base 1101: mod_base = OTHER; note = thymine
  modified_base 1108: mod_base = OTHER; note = thymine
  modified_base 1110: mod_base = OTHER; note = thymine
  modified_base 1113: mod_base = OTHER; note = thymine
  modified_base 1115..1116: mod_base = OTHER; note = thymine
  modified_base 1119: mod_base = OTHER; note = thymine
  modified_base 1121..1123: mod_base = OTHER; note = thymine
  modified_base 1125..1126: mod_base = OTHER; note = thymine
  modified_base 1128: mod_base = OTHER; note = thymine
  modified_base 1133..1134: mod_base = OTHER; note = thymine
  modified_base 1140: mod_base = OTHER; note = thymine
  modified_base 1145..1146: mod_base = OTHER; note = thymine
  modified_base 1149: mod_base = OTHER; note = thymine
  modified_base 1152: mod_base = OTHER; note = thymine
  modified_base 1155..1159: mod_base = OTHER; note = thymine
  modified_base 1161: mod_base = OTHER; note = thymine
  modified_base 1163..1167: mod_base = OTHER; note = thymine
  modified_base 1173: mod_base = OTHER; note = thymine
  modified_base 1176: mod_base = OTHER; note = thymine
  modified_base 1182: mod_base = OTHER; note = thymine
  modified_base 1184..1185: mod_base = OTHER; note = thymine
  modified_base 1188: mod_base = OTHER; note = thymine
  modified_base 1191: mod_base = OTHER; note = thymine
  modified_base 1194: mod_base = OTHER; note = thymine
  modified_base 1196..1197: mod_base = OTHER; note = thymine
  modified_base 1203: mod_base = OTHER; note = thymine
  modified_base 1206: mod_base = OTHER; note = thymine
  modified_base 1208..1209: mod_base = OTHER; note = thymine
  modified_base 1215: mod_base = OTHER; note = thymine
  modified_base 1220..1221: mod_base = OTHER; note = thymine
  modified_base 1223..1224: mod_base = OTHER; note = thymine
  modified_base 1230: mod_base = OTHER; note = thymine
  modified_base 1232..1233: mod_base = OTHER; note = thymine
  modified_base 1235..1236: mod_base = OTHER; note = thymine
  modified_base 1242: mod_base = OTHER; note = thymine
  modified_base 1244..1246: mod_base = OTHER; note = thymine
  modified_base 1248..1251: mod_base = OTHER; note = thymine
  modified_base 1254: mod_base = OTHER; note = thymine
  modified_base 1258..1260: mod_base = OTHER; note = thymine
  modified_base 1262..1263: mod_base = OTHER; note = thymine
  modified_base 1268..1270: mod_base = OTHER; note = thymine
  modified_base 1272: mod_base = OTHER; note = thymine
  modified_base 1274..1275: mod_base = OTHER; note = thymine
  modified_base 1281: mod_base = OTHER; note = thymine
  modified_base 1283..1284: mod_base = OTHER; note = thymine
  modified_base 1287: mod_base = OTHER; note = thymine
  modified_base 1290: mod_base = OTHER; note = thymine
  modified_base 1292..1293: mod_base = OTHER; note = thymine
  modified_base 1295..1296: mod_base = OTHER; note = thymine
  modified_base 1299: mod_base = OTHER; note = thymine
  modified_base 1301..1302: mod_base = OTHER; note = thymine
  modified_base 1304: mod_base = OTHER; note = thymine
  modified_base 1314: mod_base = OTHER; note = thymine
  modified_base 1320..1321: mod_base = OTHER; note = thymine
  modified_base 1323: mod_base = OTHER; note = thymine
  modified_base 1326: mod_base = OTHER; note = thymine
  modified_base 1332..1333: mod_base = OTHER; note = thymine
  modified_base 1335: mod_base = OTHER; note = thymine
  modified_base 1338: mod_base = OTHER; note = thymine
  modified_base 1343..1345: mod_base = OTHER; note = thymine
  modified_base 1347: mod_base = OTHER; note = thymine
  modified_base 1350: mod_base = OTHER; note = thymine
  modified_base 1353: mod_base = OTHER; note = thymine
  modified_base 1356..1357: mod_base = OTHER; note = thymine
  modified_base 1359: mod_base = OTHER; note = thymine
  modified_base 1362: mod_base = OTHER; note = thymine
  modified_base 1371: mod_base = OTHER; note = thymine
  modified_base 1374: mod_base = OTHER; note = thymine
  modified_base 1385..1387: mod_base = OTHER; note = thymine
  modified_base 1389: mod_base = OTHER; note = thymine
  modified_base 1391..1392: mod_base = OTHER; note = thymine
  modified_base 1395: mod_base = OTHER; note = thymine
  modified_base 1398: mod_base = OTHER; note = thymine
  modified_base 1400..1401: mod_base = OTHER; note = thymine
  modified_base 1404: mod_base = OTHER; note = thymine
  modified_base 1407: mod_base = OTHER; note = thymine
  modified_base 1410: mod_base = OTHER; note = thymine
  modified_base 1415..1416: mod_base = OTHER; note = thymine
  modified_base 1419: mod_base = OTHER; note = thymine
  modified_base 1422: mod_base = OTHER; note = thymine
  modified_base 1425: mod_base = OTHER; note = thymine
  modified_base 1427..1428: mod_base = OTHER; note = thymine
  modified_base 1430..1431: mod_base = OTHER; note = thymine
  modified_base 1433..1434: mod_base = OTHER; note = thymine
  modified_base 1437: mod_base = OTHER; note = thymine
  modified_base 1440: mod_base = OTHER; note = thymine
  modified_base 1442..1444: mod_base = OTHER; note = thymine
  modified_base 1446: mod_base = OTHER; note = thymine
  modified_base 1452: mod_base = OTHER; note = thymine
  modified_base 1455: mod_base = OTHER; note = thymine
  modified_base 1460..1461: mod_base = OTHER; note = thymine
  modified_base 1463..1464: mod_base = OTHER; note = thymine
  modified_base 1467: mod_base = OTHER; note = thymine
  modified_base 1470: mod_base = OTHER; note = thymine
  modified_base 1472..1473: mod_base = OTHER; note = thymine
  modified_base 1475..1476: mod_base = OTHER; note = thymine
  modified_base 1479: mod_base = OTHER; note = thymine
  modified_base 1482..1483: mod_base = OTHER; note = thymine
  modified_base 1485: mod_base = OTHER; note = thymine
  modified_base 1488..1489: mod_base = OTHER; note = thymine
  modified_base 1491: mod_base = OTHER; note = thymine
  modified_base 1494: mod_base = OTHER; note = thymine
  modified_base 1497: mod_base = OTHER; note = thymine
  modified_base 1500: mod_base = OTHER; note = thymine
  modified_base 1502..1503: mod_base = OTHER; note = thymine
  modified_base 1506: mod_base = OTHER; note = thymine
  modified_base 1508..1509: mod_base = OTHER; note = thymine
  modified_base 1515: mod_base = OTHER; note = thymine
  modified_base 1518: mod_base = OTHER; note = thymine
  modified_base 1521: mod_base = OTHER; note = thymine
  modified_base 1526..1527: mod_base = OTHER; note = thymine
  modified_base 1530: mod_base = OTHER; note = thymine
  modified_base 1534: mod_base = OTHER; note = thymine
  modified_base 1536..1539: mod_base = OTHER; note = thymine
  modified_base 1545: mod_base = OTHER; note = thymine
  modified_base 1548: mod_base = OTHER; note = thymine
  modified_base 1556..1557: mod_base = OTHER; note = thymine
  modified_base 1566: mod_base = OTHER; note = thymine
  modified_base 1578: mod_base = OTHER; note = thymine
  modified_base 1581: mod_base = OTHER; note = thymine
  modified_base 1587: mod_base = OTHER; note = thymine
  modified_base 1590: mod_base = OTHER; note = thymine
  modified_base 1599: mod_base = OTHER; note = thymine
  modified_base 1602: mod_base = OTHER; note = thymine
  modified_base 1605: mod_base = OTHER; note = thymine
  modified_base 1609..1611: mod_base = OTHER; note = thymine
  modified_base 1614: mod_base = OTHER; note = thymine
  modified_base 1618: mod_base = OTHER; note = thymine
  modified_base 1620..1623: mod_base = OTHER; note = thymine
  modified_base 1626: mod_base = OTHER; note = thymine
  modified_base 1629..1632: mod_base = OTHER; note = thymine
  modified_base 1634..1635: mod_base = OTHER; note = thymine
  modified_base 1638: mod_base = OTHER; note = thymine
  modified_base 1644: mod_base = OTHER; note = thymine
  modified_base 1648: mod_base = OTHER; note = thymine
  modified_base 1650: mod_base = OTHER; note = thymine
  modified_base 1656: mod_base = OTHER; note = thymine
  modified_base 1658..1659: mod_base = OTHER; note = thymine
  modified_base 1661..1662: mod_base = OTHER; note = thymine
  modified_base 1667..1668: mod_base = OTHER; note = thymine
  modified_base 1671: mod_base = OTHER; note = thymine
  modified_base 1673..1675: mod_base = OTHER; note = thymine
  modified_base 1677: mod_base = OTHER; note = thymine
  modified_base 1689: mod_base = OTHER; note = thymine
  modified_base 1692: mod_base = OTHER; note = thymine
  modified_base 1696: mod_base = OTHER; note = thymine
  modified_base 1698: mod_base = OTHER; note = thymine
  modified_base 1700..1702: mod_base = OTHER; note = thymine
  modified_base 1704..1705: mod_base = OTHER; note = thymine
  modified_base 1707: mod_base = OTHER; note = thymine
  modified_base 1710: mod_base = OTHER; note = thymine
  modified_base 1718..1719: mod_base = OTHER; note = thymine
  modified_base 1722: mod_base = OTHER; note = thymine
  modified_base 1724..1725: mod_base = OTHER; note = thymine
  modified_base 1727..1728: mod_base = OTHER; note = thymine
  modified_base 1731: mod_base = OTHER; note = thymine
  modified_base 1733..1734: mod_base = OTHER; note = thymine
  modified_base 1737: mod_base = OTHER; note = thymine
  modified_base 1746..1747: mod_base = OTHER; note = thymine
  modified_base 1749: mod_base = OTHER; note = thymine
  modified_base 1751..1752: mod_base = OTHER; note = thymine
  modified_base 1757..1758: mod_base = OTHER; note = thymine
  modified_base 1761: mod_base = OTHER; note = thymine
  modified_base 1764: mod_base = OTHER; note = thymine
  modified_base 1767: mod_base = OTHER; note = thymine
  modified_base 1769..1770: mod_base = OTHER; note = thymine
  modified_base 1773..1777: mod_base = OTHER; note = thymine
  modified_base 1779: mod_base = OTHER; note = thymine
  modified_base 1782: mod_base = OTHER; note = thymine
  modified_base 1785..1786: mod_base = OTHER; note = thymine
  modified_base 1791: mod_base = OTHER; note = thymine
  modified_base 1794..1795: mod_base = OTHER; note = thymine
  modified_base 1797..1800: mod_base = OTHER; note = thymine
  modified_base 1803: mod_base = OTHER; note = thymine
  modified_base 1806: mod_base = OTHER; note = thymine
  modified_base 1811..1812: mod_base = OTHER; note = thymine
  modified_base 1814..1815: mod_base = OTHER; note = thymine
  modified_base 1817..1818: mod_base = OTHER; note = thymine
  modified_base 1820..1821: mod_base = OTHER; note = thymine
  modified_base 1824..1825: mod_base = OTHER; note = thymine
  modified_base 1827: mod_base = OTHER; note = thymine
  modified_base 1833: mod_base = OTHER; note = thymine
  modified_base 1839: mod_base = OTHER; note = thymine
  modified_base 1845: mod_base = OTHER; note = thymine
  modified_base 1848: mod_base = OTHER; note = thymine
  modified_base 1854: mod_base = OTHER; note = thymine
  modified_base 1857..1858: mod_base = OTHER; note = thymine
  modified_base 1860: mod_base = OTHER; note = thymine
  modified_base 1864: mod_base = OTHER; note = thymine
  modified_base 1866..1869: mod_base = OTHER; note = thymine
  modified_base 1872: mod_base = OTHER; note = thymine
  modified_base 1875: mod_base = OTHER; note = thymine
  modified_base 1881: mod_base = OTHER; note = thymine
  modified_base 1884..1885: mod_base = OTHER; note = thymine
  modified_base 1887: mod_base = OTHER; note = thymine
  modified_base 1890: mod_base = OTHER; note = thymine
  modified_base 1894: mod_base = OTHER; note = thymine
  modified_base 1903..1905: mod_base = OTHER; note = thymine
  modified_base 1911: mod_base = OTHER; note = thymine
  modified_base 1914: mod_base = OTHER; note = thymine
  modified_base 1916..1917: mod_base = OTHER; note = thymine
  modified_base 1923..1924: mod_base = OTHER; note = thymine
  modified_base 1926: mod_base = OTHER; note = thymine
  modified_base 1929..1932: mod_base = OTHER; note = thymine
  modified_base 1935: mod_base = OTHER; note = thymine
  modified_base 1938..1939: mod_base = OTHER; note = thymine
  modified_base 1941: mod_base = OTHER; note = thymine
  modified_base 1953: mod_base = OTHER; note = thymine
  modified_base 1955..1956: mod_base = OTHER; note = thymine
  modified_base 1958..1959: mod_base = OTHER; note = thymine
  modified_base 1961..1962: mod_base = OTHER; note = thymine
  modified_base 1969..1971: mod_base = OTHER; note = thymine
  modified_base 1974: mod_base = OTHER; note = thymine
  modified_base 1980: mod_base = OTHER; note = thymine
  modified_base 1983..1986: mod_base = OTHER; note = thymine
  modified_base 1993: mod_base = OTHER; note = thymine
  modified_base 1995: mod_base = OTHER; note = thymine
  modified_base 1998: mod_base = OTHER; note = thymine
  modified_base 2000..2001: mod_base = OTHER; note = thymine
  modified_base 2004: mod_base = OTHER; note = thymine
  modified_base 2007: mod_base = OTHER; note = thymine
  modified_base 2010: mod_base = OTHER; note = thymine
  modified_base 2013..2014: mod_base = OTHER; note = thymine
  modified_base 2016: mod_base = OTHER; note = thymine
  modified_base 2018..2019: mod_base = OTHER; note = thymine
  modified_base 2022: mod_base = OTHER; note = thymine
  modified_base 2025..2028: mod_base = OTHER; note = thymine
  modified_base 2030..2032: mod_base = OTHER; note = thymine
  modified_base 2034: mod_base = OTHER; note = thymine
  modified_base 2038..2040: mod_base = OTHER; note = thymine
  modified_base 2042..2043: mod_base = OTHER; note = thymine
  modified_base 2046: mod_base = OTHER; note = thymine
  modified_base 2049: mod_base = OTHER; note = thymine
  modified_base 2052: mod_base = OTHER; note = thymine
  modified_base 2054..2055: mod_base = OTHER; note = thymine
  modified_base 2057..2058: mod_base = OTHER; note = thymine
  modified_base 2060..2061: mod_base = OTHER; note = thymine
  modified_base 2064: mod_base = OTHER; note = thymine
  modified_base 2067: mod_base = OTHER; note = thymine
  modified_base 2073: mod_base = OTHER; note = thymine
  modified_base 2079: mod_base = OTHER; note = thymine
  modified_base 2082: mod_base = OTHER; note = thymine
  modified_base 2084..2088: mod_base = OTHER; note = thymine
  modified_base 2091..2092: mod_base = OTHER; note = thymine
  modified_base 2094: mod_base = OTHER; note = thymine
  modified_base 2097: mod_base = OTHER; note = thymine
  modified_base 2100: mod_base = OTHER; note = thymine
  modified_base 2105..2106: mod_base = OTHER; note = thymine
  modified_base 2109: mod_base = OTHER; note = thymine
  modified_base 2112: mod_base = OTHER; note = thymine
  modified_base 2114..2115: mod_base = OTHER; note = thymine
  modified_base 2117..2118: mod_base = OTHER; note = thymine
  modified_base 2121: mod_base = OTHER; note = thymine
  modified_base 2124..2128: mod_base = OTHER; note = thymine
  modified_base 2133: mod_base = OTHER; note = thymine
  modified_base 2135..2136: mod_base = OTHER; note = thymine
  modified_base 2139: mod_base = OTHER; note = thymine
  modified_base 2144..2145: mod_base = OTHER; note = thymine
  modified_base 2148: mod_base = OTHER; note = thymine
  modified_base 2151: mod_base = OTHER; note = thymine
  modified_base 2157: mod_base = OTHER; note = thymine
  modified_base 2160: mod_base = OTHER; note = thymine
  modified_base 2163: mod_base = OTHER; note = thymine
  modified_base 2166: mod_base = OTHER; note = thymine
  modified_base 2169: mod_base = OTHER; note = thymine
  modified_base 2172: mod_base = OTHER; note = thymine
  modified_base 2174..2175: mod_base = OTHER; note = thymine
  modified_base 2178: mod_base = OTHER; note = thymine
  modified_base 2181: mod_base = OTHER; note = thymine
  modified_base 2183..2184: mod_base = OTHER; note = thymine
  modified_base 2186..2187: mod_base = OTHER; note = thymine
  modified_base 2189..2190: mod_base = OTHER; note = thymine
  modified_base 2193..2194: mod_base = OTHER; note = thymine
  modified_base 2196..2197: mod_base = OTHER; note = thymine
  modified_base 2199: mod_base = OTHER; note = thymine
  modified_base 2202: mod_base = OTHER; note = thymine
  modified_base 2204..2205: mod_base = OTHER; note = thymine
  modified_base 2208: mod_base = OTHER; note = thymine
  modified_base 2210: mod_base = OTHER; note = thymine
  modified_base 2222..2223: mod_base = OTHER; note = thymine
  modified_base 2226: mod_base = OTHER; note = thymine
  modified_base 2229..2232: mod_base = OTHER; note = thymine
  modified_base 2234..2235: mod_base = OTHER; note = thymine
  modified_base 2238..2239: mod_base = OTHER; note = thymine
  modified_base 2241: mod_base = OTHER; note = thymine
  modified_base 2249: mod_base = OTHER; note = thymine
  modified_base 2253: mod_base = OTHER; note = thymine
  modified_base 2256..2259: mod_base = OTHER; note = thymine
  modified_base 2262: mod_base = OTHER; note = thymine
  modified_base 2265: mod_base = OTHER; note = thymine
  modified_base 2271: mod_base = OTHER; note = thymine
  modified_base 2273..2274: mod_base = OTHER; note = thymine
  modified_base 2277: mod_base = OTHER; note = thymine
  modified_base 2286: mod_base = OTHER; note = thymine
  modified_base 2289: mod_base = OTHER; note = thymine
  modified_base 2294..2295: mod_base = OTHER; note = thymine
  modified_base 2297..2298: mod_base = OTHER; note = thymine
  modified_base 2301: mod_base = OTHER; note = thymine
  modified_base 2310: mod_base = OTHER; note = thymine
  modified_base 2313..2316: mod_base = OTHER; note = thymine
  modified_base 2319: mod_base = OTHER; note = thymine
  modified_base 2325..2326: mod_base = OTHER; note = thymine
  modified_base 2332..2337: mod_base = OTHER; note = thymine
  modified_base 2340: mod_base = OTHER; note = thymine
  modified_base 2348..2349: mod_base = OTHER; note = thymine
  modified_base 2351: mod_base = OTHER; note = thymine
  modified_base 2354..2355: mod_base = OTHER; note = thymine
  modified_base 2358: mod_base = OTHER; note = thymine
  modified_base 2360..2364: mod_base = OTHER; note = thymine
  modified_base 2367: mod_base = OTHER; note = thymine
  modified_base 2373: mod_base = OTHER; note = thymine
  modified_base 2376: mod_base = OTHER; note = thymine
  modified_base 2379: mod_base = OTHER; note = thymine
  modified_base 2385: mod_base = OTHER; note = thymine
  modified_base 2389..2391: mod_base = OTHER; note = thymine
  modified_base 2400: mod_base = OTHER; note = thymine
  modified_base 2403: mod_base = OTHER; note = thymine
  modified_base 2406: mod_base = OTHER; note = thymine
  modified_base 2409: mod_base = OTHER; note = thymine
  modified_base 2417..2418: mod_base = OTHER; note = thymine
  modified_base 2421: mod_base = OTHER; note = thymine
  modified_base 2424: mod_base = OTHER; note = thymine
  modified_base 2426..2427: mod_base = OTHER; note = thymine
  modified_base 2429..2430: mod_base = OTHER; note = thymine
  modified_base 2433: mod_base = OTHER; note = thymine
  modified_base 2441..2443: mod_base = OTHER; note = thymine
  modified_base 2445..2446: mod_base = OTHER; note = thymine
  modified_base 2448: mod_base = OTHER; note = thymine
  modified_base 2451: mod_base = OTHER; note = thymine
  modified_base 2454: mod_base = OTHER; note = thymine
  modified_base 2460: mod_base = OTHER; note = thymine
  modified_base 2462..2463: mod_base = OTHER; note = thymine
  modified_base 2466: mod_base = OTHER; note = thymine
  modified_base 2470: mod_base = OTHER; note = thymine
  modified_base 2472: mod_base = OTHER; note = thymine
  modified_base 2474..2475: mod_base = OTHER; note = thymine
  modified_base 2478: mod_base = OTHER; note = thymine
  modified_base 2481: mod_base = OTHER; note = thymine
  modified_base 2483..2487: mod_base = OTHER; note = thymine
  modified_base 2489..2491: mod_base = OTHER; note = thymine
  modified_base 2493: mod_base = OTHER; note = thymine
  modified_base 2496: mod_base = OTHER; note = thymine
  modified_base 2499: mod_base = OTHER; note = thymine
  modified_base 2502: mod_base = OTHER; note = thymine
  modified_base 2505: mod_base = OTHER; note = thymine
  modified_base 2508: mod_base = OTHER; note = thymine
  modified_base 2513: mod_base = OTHER; note = thymine
  modified_base 2515: mod_base = OTHER; note = thymine
  modified_base 2517: mod_base = OTHER; note = thymine
  modified_base 2520: mod_base = OTHER; note = thymine
  modified_base 2523: mod_base = OTHER; note = thymine
  modified_base 2526: mod_base = OTHER; note = thymine
  modified_base 2532: mod_base = OTHER; note = thymine
  modified_base 2535: mod_base = OTHER; note = thymine
  modified_base 2537..2538: mod_base = OTHER; note = thymine
  modified_base 2541..2542: mod_base = OTHER; note = thymine
  modified_base 2544: mod_base = OTHER; note = thymine
  modified_base 2547: mod_base = OTHER; note = thymine
  modified_base 2553..2556: mod_base = OTHER; note = thymine
  modified_base 2558..2559: mod_base = OTHER; note = thymine
  modified_base 2565: mod_base = OTHER; note = thymine
  modified_base 2568: mod_base = OTHER; note = thymine
  modified_base 2576..2578: mod_base = OTHER; note = thymine
  modified_base 2580: mod_base = OTHER; note = thymine
  modified_base 2582..2583: mod_base = OTHER; note = thymine
  modified_base 2589: mod_base = OTHER; note = thymine
  modified_base 2591..2593: mod_base = OTHER; note = thymine
  modified_base 2597..2598: mod_base = OTHER; note = thymine
  modified_base 2601: mod_base = OTHER; note = thymine
  modified_base 2606..2607: mod_base = OTHER; note = thymine
  modified_base 2612..2613: mod_base = OTHER; note = thymine
  modified_base 2616: mod_base = OTHER; note = thymine
  modified_base 2619: mod_base = OTHER; note = thymine
  modified_base 2621..2622: mod_base = OTHER; note = thymine
  modified_base 2628: mod_base = OTHER; note = thymine
  modified_base 2630: mod_base = OTHER; note = thymine
  modified_base 2633..2634: mod_base = OTHER; note = thymine
  modified_base 2637..2638: mod_base = OTHER; note = thymine
  modified_base 2640: mod_base = OTHER; note = thymine
  modified_base 2646: mod_base = OTHER; note = thymine
  modified_base 2649: mod_base = OTHER; note = thymine
  modified_base 2652: mod_base = OTHER; note = thymine
  modified_base 2657..2658: mod_base = OTHER; note = thymine
  modified_base 2663..2665: mod_base = OTHER; note = thymine
  modified_base 2667: mod_base = OTHER; note = thymine
  modified_base 2673: mod_base = OTHER; note = thymine
  modified_base 2675..2676: mod_base = OTHER; note = thymine
  modified_base 2682: mod_base = OTHER; note = thymine
  modified_base 2685: mod_base = OTHER; note = thymine
  modified_base 2687..2688: mod_base = OTHER; note = thymine
  modified_base 2694..2695: mod_base = OTHER; note = thymine
  modified_base 2697: mod_base = OTHER; note = thymine
  modified_base 2700: mod_base = OTHER; note = thymine
  modified_base 2703: mod_base = OTHER; note = thymine
  modified_base 2706: mod_base = OTHER; note = thymine
  modified_base 2709: mod_base = OTHER; note = thymine
  modified_base 2718..2721: mod_base = OTHER; note = thymine
  modified_base 2724: mod_base = OTHER; note = thymine
  modified_base 2727: mod_base = OTHER; note = thymine
  modified_base 2733: mod_base = OTHER; note = thymine
  modified_base 2736: mod_base = OTHER; note = thymine
  modified_base 2739..2743: mod_base = OTHER; note = thymine
  modified_base 2745: mod_base = OTHER; note = thymine
  modified_base 2754: mod_base = OTHER; note = thymine
  modified_base 2757: mod_base = OTHER; note = thymine
  modified_base 2762..2763: mod_base = OTHER; note = thymine
  modified_base 2765..2766: mod_base = OTHER; note = thymine
  modified_base 2772: mod_base = OTHER; note = thymine
  modified_base 2774..2775: mod_base = OTHER; note = thymine
  modified_base 2778: mod_base = OTHER; note = thymine
  modified_base 2780..2781: mod_base = OTHER; note = thymine
  modified_base 2790: mod_base = OTHER; note = thymine
  modified_base 2797: mod_base = OTHER; note = thymine
  modified_base 2799: mod_base = OTHER; note = thymine
  modified_base 2802: mod_base = OTHER; note = thymine
  modified_base 2804..2805: mod_base = OTHER; note = thymine
  modified_base 2807..2808: mod_base = OTHER; note = thymine
  modified_base 2810..2811: mod_base = OTHER; note = thymine
  modified_base 2814: mod_base = OTHER; note = thymine
  modified_base 2823: mod_base = OTHER; note = thymine
  modified_base 2826..2827: mod_base = OTHER; note = thymine
  modified_base 2829: mod_base = OTHER; note = thymine
  modified_base 2832: mod_base = OTHER; note = thymine
  modified_base 2834..2835: mod_base = OTHER; note = thymine
  modified_base 2838: mod_base = OTHER; note = thymine
  modified_base 2841: mod_base = OTHER; note = thymine
  modified_base 2844: mod_base = OTHER; note = thymine
  modified_base 2847: mod_base = OTHER; note = thymine
  modified_base 2850: mod_base = OTHER; note = thymine
  modified_base 2852: mod_base = OTHER; note = thymine
  modified_base 2855..2856: mod_base = OTHER; note = thymine
  modified_base 2859: mod_base = OTHER; note = thymine
  modified_base 2861..2862: mod_base = OTHER; note = thymine
  modified_base 2865: mod_base = OTHER; note = thymine
  modified_base 2867..2872: mod_base = OTHER; note = thymine
  modified_base 2874: mod_base = OTHER; note = thymine
  modified_base 2879..2880: mod_base = OTHER; note = thymine
  modified_base 2883: mod_base = OTHER; note = thymine
  modified_base 2892: mod_base = OTHER; note = thymine
  modified_base 2898: mod_base = OTHER; note = thymine
  modified_base 2902: mod_base = OTHER; note = thymine
  modified_base 2904..2907: mod_base = OTHER; note = thymine
  modified_base 2909..2910: mod_base = OTHER; note = thymine
  modified_base 2912..2913: mod_base = OTHER; note = thymine
  modified_base 2916: mod_base = OTHER; note = thymine
  modified_base 2918..2920: mod_base = OTHER; note = thymine
  modified_base 2922: mod_base = OTHER; note = thymine
  modified_base 2925..2926: mod_base = OTHER; note = thymine
  modified_base 2933..2934: mod_base = OTHER; note = thymine
  modified_base 2937: mod_base = OTHER; note = thymine
  modified_base 2943: mod_base = OTHER; note = thymine
  modified_base 2945..2946: mod_base = OTHER; note = thymine
  modified_base 2948..2949: mod_base = OTHER; note = thymine
  modified_base 2952: mod_base = OTHER; note = thymine
  modified_base 2955: mod_base = OTHER; note = thymine
  modified_base 2957..2958: mod_base = OTHER; note = thymine
  modified_base 2961..2962: mod_base = OTHER; note = thymine
  modified_base 2964: mod_base = OTHER; note = thymine
  modified_base 2970..2971: mod_base = OTHER; note = thymine
  modified_base 2973: mod_base = OTHER; note = thymine
  modified_base 2976: mod_base = OTHER; note = thymine
  modified_base 2978..2979: mod_base = OTHER; note = thymine
  modified_base 2982: mod_base = OTHER; note = thymine
  modified_base 2985..2986: mod_base = OTHER; note = thymine
  modified_base 2988..2989: mod_base = OTHER; note = thymine
  modified_base 2991: mod_base = OTHER; note = thymine
  modified_base 2994..2998: mod_base = OTHER; note = thymine
  modified_base 3000..3004: mod_base = OTHER; note = thymine
  modified_base 3006: mod_base = OTHER; note = thymine
  modified_base 3008..3009: mod_base = OTHER; note = thymine
  modified_base 3012: mod_base = OTHER; note = thymine
  modified_base 3016: mod_base = OTHER; note = thymine
  modified_base 3018: mod_base = OTHER; note = thymine
  modified_base 3021: mod_base = OTHER; note = thymine
  modified_base 3023..3024: mod_base = OTHER; note = thymine
  modified_base 3026..3027: mod_base = OTHER; note = thymine
  modified_base 3030..3033: mod_base = OTHER; note = thymine
  modified_base 3042: mod_base = OTHER; note = thymine
  modified_base 3049: mod_base = OTHER; note = thymine
  modified_base 3051: mod_base = OTHER; note = thymine
  modified_base 3056..3057: mod_base = OTHER; note = thymine
  modified_base 3061..3063: mod_base = OTHER; note = thymine
  modified_base 3066..3067: mod_base = OTHER; note = thymine
  modified_base 3069..3070: mod_base = OTHER; note = thymine
  modified_base 3072: mod_base = OTHER; note = thymine
  modified_base 3074..3075: mod_base = OTHER; note = thymine
  modified_base 3078..3079: mod_base = OTHER; note = thymine
  modified_base 3081: mod_base = OTHER; note = thymine
  modified_base 3084..3085: mod_base = OTHER; note = thymine
  modified_base 3087..3088: mod_base = OTHER; note = thymine
  modified_base 3090: mod_base = OTHER; note = thymine
  modified_base 3093: mod_base = OTHER; note = thymine
  modified_base 3096: mod_base = OTHER; note = thymine
  modified_base 3099..3103: mod_base = OTHER; note = thymine
  modified_base 3105: mod_base = OTHER; note = thymine
  modified_base 3107..3108: mod_base = OTHER; note = thymine
  modified_base 3111..3112: mod_base = OTHER; note = thymine
  modified_base 3117: mod_base = OTHER; note = thymine
  modified_base 3120: mod_base = OTHER; note = thymine
  modified_base 3126..3127: mod_base = OTHER; note = thymine
  modified_base 3129: mod_base = OTHER; note = thymine
  modified_base 3142..3144: mod_base = OTHER; note = thymine
  modified_base 3147: mod_base = OTHER; note = thymine
  modified_base 3149..3151: mod_base = OTHER; note = thymine
  modified_base 3153: mod_base = OTHER; note = thymine
  modified_base 3156: mod_base = OTHER; note = thymine
  modified_base 3162: mod_base = OTHER; note = thymine
  modified_base 3164..3165: mod_base = OTHER; note = thymine
  modified_base 3167..3168: mod_base = OTHER; note = thymine
  modified_base 3170..3171: mod_base = OTHER; note = thymine
  modified_base 3173..3174: mod_base = OTHER; note = thymine
  modified_base 3181: mod_base = OTHER; note = thymine
  modified_base 3183: mod_base = OTHER; note = thymine
  modified_base 3188..3189: mod_base = OTHER; note = thymine
  modified_base 3192: mod_base = OTHER; note = thymine
  modified_base 3197..3198: mod_base = OTHER; note = thymine
  modified_base 3201: mod_base = OTHER; note = thymine
  modified_base 3209..3210: mod_base = OTHER; note = thymine
  modified_base 3213: mod_base = OTHER; note = thymine
  modified_base 3216..3217: mod_base = OTHER; note = thymine
  modified_base 3219: mod_base = OTHER; note = thymine
  modified_base 3222: mod_base = OTHER; note = thymine
  modified_base 3224..3225: mod_base = OTHER; note = thymine
  modified_base 3234: mod_base = OTHER; note = thymine
  modified_base 3237: mod_base = OTHER; note = thymine
  modified_base 3240: mod_base = OTHER; note = thymine
  modified_base 3242..3243: mod_base = OTHER; note = thymine
  modified_base 3246: mod_base = OTHER; note = thymine
  misc_feature 1..3249: note = Synthetic
  source 1..3249: mol_type = other RNA
atggctgcttttaagcctaatcctattaattatattcttggtcttgatattggtattgcttctgttggttgggctatggttgagattgatgaggaggagaatcctattcgtcttattgatcttggtgttcgtgtttttgagcgtgctgaggttcctaagactggtgattctcttgctatggctcgtcgtcttgctcgttctgttcgtcgtcttactcgtcgtcgtgctcatcgtcttcttcgtgctcgtcgtcttcttaagcgtgagggtgttcttcaggctgctgattttgatgagaatggtcttattaagtctcttcctaatactccttggcagcttcgtgctgctgctcttgatcgtaagcttactcctcttgagtggtctgctgttcttcttcatcttattaagcatcgtggttatctttctcagcgtaagaatgagggtgagactgctgataaggagcttggtgctcttcttaagggtgttgctaataatgctcatgctcttcagactggtgattttcgtactcctgctgagcttgctcttaataagtttgagaaggagtctggtcatattcgtaatcagcgtggtgattattctcatactttttctcgtaaggatcttcaggctgagcttattcttctttttgagaagcagaaggagtttggtaatcctcatgtttctggtggtcttaaggagggtattgagactcttcttatgactcagcgtcctgctctttctggtgatgctgttcagaagatgcttggtcattgtacttttgagcctgctgagcctaaggctgctaagaatacttatactgctgagcgttttatttggcttactaagcttaataatcttcgtattcttgagcagggttctgagcgtcctcttactgatactgagcgtgctactcttatggatgagccttatcgtaagtctaagcttacttatgctcaggctcgtaagcttcttggtcttgaggatactgctttttttaagggtcttcgttatggtaaggataatgctgaggcttctactcttatggagatgaaggcttatcatgctatttctcgtgctcttgagaaggagggtcttaaggataagaagtctcctcttaatctttcttctgagcttcaggatgagattggtactgctttttctctttttaagactgatgaggatattactggtcgtcttaaggatcgtgttcagcctgagattcttgaggctcttcttaagcatatttcttttgataagtttgttcagatttctcttaaggctcttcgtcgtattgttcctcttatggagcagggtaagcgttatgatgaggcttgtgctgagatttatggtgatcattatggtaagaagaatactgaggagaagatttatcttcctcctattcctgctgatgagattcgtaatcctgttgttcttcgtgctctttctcaggctcgtaaggttattaatggtgttgttcgtcgttatggttctcctgctcgtattcatattgagactgctcgtgaggttggtaagtcttttaaggatcgtaaggagattgagaagcgtcaggaggagaatcgtaaggatcgtgagaaggctgctgctaagtttcgtgagtattttcctaattttgttggtgagcctaagtctaaggatattcttaagcttcgtctttatgagcagcagcatggtaagtgtctttattctggtaaggagattaatcttgttcgtcttaatgagaagggttatgttgagattgatcatgctcttcctttttctcgtacttgggatgattcttttaataataaggttcttgttcttggttctgagaatcagaataagggtaatcagactccttatgagtattttaatggtaaggataattctcgtgagtggcaggagtttaaggctcgtgttgagacttctcgttttcctcgttctaagaagcagcgtattcttcttcagaagtttgatgaggatggttttaaggagtgtaatcttaatgatactcgttatgttaatcgttttctttgtcagtttgttgctgatcatattcttcttactggtaagggtaagcgtcgtgtttttgcttctaatggtcagattactaatcttcttcgtggtttttggggtcttcgtaaggttcgtgctgagaatgatcgtcatcatgctcttgatgctgttgttgttgcttgttctactgttgctatgcagcagaagattactcgttttgttcgttataaggagatgaatgcttttgatggtaagactattgataaggagactggtaaggttcttcatcagaagactcattttcctcagccttgggagttttttgctcaggaggttatgattcgtgtttttggtaagcctgatggtaagcctgagtttgaggaggctgatactcctgagaagcttcgtactcttcttgctgagaagctttcttctcgtcctgaggctgttcatgagtatgttactcctctttttgtttctcgtgctcctaatcgtaagatgtctggtgctcataaggatactcttcgttctgctaagcgttttgttaagcataatgagaagatttctgttaagcgtgtttggcttactgagattaagcttgctgatcttgagaatatggttaattataagaatggtcgtgagattgagctttatgaggctcttaaggctcgtcttgaggcttatggtggtaatgctaagcaggcttttgatcctaaggataatcctttttataagaagggtggtcagcttgttaaggctgttcgtgttgagaagactcaggagtctggtgttcttcttaataagaagaatgcttatactattgctgataatggtgatatggttcgtgttgatgttttttgtaaggttgataagaagggtaagaatcagtattttattgttcctatttatgcttggcaggttgctgagaatattcttcctgatattgattgtaagggttatcgtattgatgattcttatactttttgtttttctcttcataagtatgatcttattgcttttcagaaggatgagaagtctaaggttgagtttgcttattatattaattgtgattcttctaatggtcgtttttatcttgcttggcatgataagggttctaaggagcagcagtttcgtatttctactcagaatcttgttcttattcagaagtatcaggttaatgagcttggtaaggagattcgtccttgtcgtcttaagaagcgtcctcctgttcgttga

SEQ ID NO: 253 - RNA, 3249 nt, synthetic construct
  modified_base 2: mod_base = OTHER; note = thymine
  modified_base 10..11: mod_base = OTHER; note = thymine
  modified_base 26: mod_base = OTHER; note = thymine
  modified_base 31: mod_base = OTHER; note = thymine
  modified_base 35: mod_base = OTHER; note = thymine
  modified_base 38: mod_base = OTHER; note = thymine
  modified_base 44: mod_base = OTHER; note = thymine
  modified_base 50: mod_base = OTHER; note = thymine
  modified_base 56: mod_base = OTHER; note = thymine
  modified_base 61: mod_base = OTHER; note = thymine
  modified_base 65: mod_base = OTHER; note = thymine
  modified_base 70: mod_base = OTHER; note = thymine
  modified_base 77: mod_base = OTHER; note = thymine
  modified_base 80: mod_base = OTHER; note = thymine
  modified_base 86: mod_base = OTHER; note = thymine
  modified_base 107: mod_base = OTHER; note = thymine
  modified_base 113: mod_base = OTHER; note = thymine
  modified_base 116: mod_base = OTHER; note = thymine
  modified_base 122: mod_base = OTHER; note = thymine
  modified_base 128: mod_base = OTHER; note = thymine
  modified_base 134: mod_base = OTHER; note = thymine
  modified_base 136..137: mod_base = OTHER; note = thymine
  modified_base 152: mod_base = OTHER; note = thymine
  modified_base 169: mod_base = OTHER; note = thymine
  modified_base 173: mod_base = OTHER; note = thymine
  modified_base 179: mod_base = OTHER; note = thymine
  modified_base 191: mod_base = OTHER; note = thymine
  modified_base 199: mod_base = OTHER; note = thymine
  modified_base 203: mod_base = OTHER; note = thymine
  modified_base 212: mod_base = OTHER; note = thymine
  modified_base 236: mod_base = OTHER; note = thymine
  modified_base 239: mod_base = OTHER; note = thymine
  modified_base 254: mod_base = OTHER; note = thymine
  modified_base 257: mod_base = OTHER; note = thymine
  modified_base 272: mod_base = OTHER; note = thymine
  modified_base 275: mod_base = OTHER; note = thymine
  modified_base 289..290: mod_base = OTHER; note = thymine
  modified_base 305: mod_base = OTHER; note = thymine
  modified_base 308: mod_base = OTHER; note = thymine
  modified_base 313: mod_base = OTHER; note = thymine
  modified_base 317: mod_base = OTHER; note = thymine
  modified_base 331: mod_base = OTHER; note = thymine
  modified_base 338: mod_base = OTHER; note = thymine
  modified_base 353: mod_base = OTHER; note = thymine
  modified_base 365: mod_base = OTHER; note = thymine
  modified_base 374: mod_base = OTHER; note = thymine
  modified_base 379: mod_base = OTHER; note = thymine
  modified_base 382: mod_base = OTHER; note = thymine
  modified_base 389: mod_base = OTHER; note = thymine
  modified_base 392: mod_base = OTHER; note = thymine
  modified_base 395: mod_base = OTHER; note = thymine
  modified_base 401: mod_base = OTHER; note = thymine
  modified_base 404: mod_base = OTHER; note = thymine
  modified_base 418: mod_base = OTHER; note = thymine
  modified_base 422: mod_base = OTHER; note = thymine
  modified_base 424: mod_base = OTHER; note = thymine
  modified_base 464: mod_base = OTHER; note = thymine
  modified_base 473: mod_base = OTHER; note = thymine
  modified_base 476: mod_base = OTHER; note = thymine
  modified_base 485: mod_base = OTHER; note = thymine
  modified_base 506: mod_base = OTHER; note = thymine
  modified_base 520..521: mod_base = OTHER; note = thymine
  modified_base 539: mod_base = OTHER; note = thymine
  modified_base 545: mod_base = OTHER; note = thymine
  modified_base 553..554: mod_base = OTHER; note = thymine
  modified_base 565: mod_base = OTHER; note = thymine
  modified_base 575: mod_base = OTHER; note = thymine
  modified_base 595: mod_base = OTHER; note = thymine
  modified_base 598: mod_base = OTHER; note = thymine
  modified_base 607..608: mod_base = OTHER; note = thymine
  modified_base 610: mod_base = OTHER; note = thymine
  modified_base 623: mod_base = OTHER; note = thymine
  modified_base 635: mod_base = OTHER; note = thymine
  modified_base 638: mod_base = OTHER; note = thymine
  modified_base 641: mod_base = OTHER; note = thymine
  modified_base 644: mod_base = OTHER; note = thymine
  modified_base 646..647: mod_base = OTHER; note = thymine
  modified_base 664..665: mod_base = OTHER; note = thymine
  modified_base 680: mod_base = OTHER; note = thymine
  modified_base 682: mod_base = OTHER; note = thymine
  modified_base 692: mod_base = OTHER; note = thymine
  modified_base 704: mod_base = OTHER; note = thymine
  modified_base 713: mod_base = OTHER; note = thymine
  modified_base 716: mod_base = OTHER; note = thymine
  modified_base 719: mod_base = OTHER; note = thymine
  modified_base 737: mod_base = OTHER; note = thymine
  modified_base 739: mod_base = OTHER; note = thymine
  modified_base 752: mod_base = OTHER; note = thymine
  modified_base 761: mod_base = OTHER; note = thymine
  modified_base 764: mod_base = OTHER; note = thymine
  modified_base 772: mod_base = OTHER; note = thymine
  modified_base 778..779: mod_base = OTHER; note = thymine
  modified_base 814: mod_base = OTHER; note = thymine
  modified_base 829..830: mod_base = OTHER; note = thymine
  modified_base 833: mod_base = OTHER; note = thymine
  modified_base 835: mod_base = OTHER; note = thymine
  modified_base 839: mod_base = OTHER; note = thymine
  modified_base 848: mod_base = OTHER; note = thymine
  modified_base 857: mod_base = OTHER; note = thymine
  modified_base 863: mod_base = OTHER; note = thymine
  modified_base 866: mod_base = OTHER; note = thymine
  modified_base 877: mod_base = OTHER; note = thymine
  modified_base 890: mod_base = OTHER; note = thymine
  modified_base 914: mod_base = OTHER; note = thymine
  modified_base 917: mod_base = OTHER; note = thymine
  modified_base 928: mod_base = OTHER; note = thymine
  modified_base 937: mod_base = OTHER; note = thymine
  modified_base 944: mod_base = OTHER; note = thymine
  modified_base 949: mod_base = OTHER; note = thymine
  modified_base 968: mod_base = OTHER; note = thymine
  modified_base 971: mod_base = OTHER; note = thymine
  modified_base 977: mod_base = OTHER; note = thymine
  modified_base 991..992: mod_base = OTHER; note = thymine
  modified_base 994..995: mod_base = OTHER; note = thymine
  modified_base 1004: mod_base = OTHER; note = thymine
  modified_base 1009: mod_base = OTHER; note = thymine
  modified_base 1033: mod_base = OTHER; note = thymine
  modified_base 1040: mod_base = OTHER; note = thymine
  modified_base 1043: mod_base = OTHER; note = thymine
  modified_base 1049: mod_base = OTHER; note = thymine
  modified_base 1057: mod_base = OTHER; note = thymine
  modified_base 1067: mod_base = OTHER; note = thymine
  modified_base 1069: mod_base = OTHER; note = thymine
  modified_base 1079: mod_base = OTHER; note = thymine
  modified_base 1094: mod_base = OTHER; note = thymine
  modified_base 1108: mod_base = OTHER; note = thymine
  modified_base 1115: mod_base = OTHER; note = thymine
  modified_base 1121: mod_base = OTHER; note = thymine
  modified_base 1123: mod_base = OTHER; note = thymine
  modified_base 1126: mod_base = OTHER; note = thymine
  modified_base 1133: mod_base = OTHER; note = thymine
  modified_base 1145: mod_base = OTHER; note = thymine
  modified_base 1156..1157: mod_base = OTHER; note = thymine
  modified_base 1159: mod_base = OTHER; note = thymine
  modified_base 1163: mod_base = OTHER; note = thymine
  modified_base 1165..1166: mod_base = OTHER; note = thymine
  modified_base 1184: mod_base = OTHER; note = thymine
  modified_base 1196: mod_base = OTHER; note = thymine
  modified_base 1208: mod_base = OTHER; note = thymine
  modified_base 1220: mod_base = OTHER; note = thymine
  modified_base 1223: mod_base = OTHER; note = thymine
  modified_base 1232: mod_base = OTHER; note = thymine
  modified_base 1235: mod_base = OTHER; note = thymine
  modified_base 1244: mod_base = OTHER; note = thymine
  modified_base 1246: mod_base = OTHER; note = thymine
  modified_base 1249..1250: mod_base = OTHER; note = thymine
  modified_base 1258..1259: mod_base = OTHER; note = thymine
  modified_base 1262: mod_base = OTHER; note = thymine
  modified_base 1268: mod_base = OTHER; note = thymine
  modified_base 1270: mod_base = OTHER; note = thymine
  modified_base 1274: mod_base = OTHER; note = thymine
  modified_base 1283: mod_base = OTHER; note = thymine
  modified_base 1292: mod_base = OTHER; note = thymine
  modified_base 1295: mod_base = OTHER; note = thymine
  modified_base 1301: mod_base = OTHER; note = thymine
  modified_base 1304: mod_base = OTHER; note = thymine
  modified_base 1321: mod_base = OTHER; note = thymine
  modified_base 1333: mod_base = OTHER; note = thymine
  modified_base 1343: mod_base = OTHER; note = thymine
  modified_base 1345: mod_base = OTHER; note = thymine
  modified_base 1357: mod_base = OTHER; note = thymine
  modified_base 1385: mod_base = OTHER; note = thymine
  modified_base 1387: mod_base = OTHER; note = thymine
  modified_base 1391: mod_base = OTHER; note = thymine
  modified_base 1400: mod_base = OTHER; note = thymine
  modified_base 1415: mod_base = OTHER; note = thymine
  modified_base 1427: mod_base = OTHER; note = thymine
  modified_base 1430: mod_base = OTHER; note = thymine
  modified_base 1433: mod_base = OTHER; note = thymine
  modified_base 1442: mod_base = OTHER; note = thymine
  modified_base 1444: mod_base = OTHER; note = thymine
  modified_base 1460: mod_base = OTHER; note = thymine
  modified_base 1463: mod_base = OTHER; note = thymine
  modified_base 1472: mod_base = OTHER; note = thymine
  modified_base 1475: mod_base = OTHER; note = thymine
  modified_base 1483: mod_base = OTHER; note = thymine
  modified_base 1489: mod_base = OTHER; note = thymine
  modified_base 1502: mod_base = OTHER; note = thymine
  modified_base 1508: mod_base = OTHER; note = thymine
  modified_base 1526: mod_base = OTHER; note = thymine
  modified_base 1534: mod_base = OTHER; note = thymine
  modified_base 1537..1538: mod_base = OTHER; note = thymine
  modified_base 1556: mod_base = OTHER; note = thymine
  modified_base 1609..1610: mod_base = OTHER; note = thymine
  modified_base 1618: mod_base = OTHER; note = thymine
  modified_base 1621..1622: mod_base = OTHER; note = thymine
  modified_base 1630..1631: mod_base = OTHER; note = thymine
  modified_base 1634: mod_base = OTHER; note = thymine
  modified_base 1648: mod_base = OTHER; note = thymine
  modified_base 1658: mod_base = OTHER; note = thymine
  modified_base 1661: mod_base = OTHER; note = thymine
  modified_base 1667: mod_base = OTHER; note = thymine
  modified_base 1673: mod_base = OTHER; note = thymine
  modified_base 1675: mod_base = OTHER; note = thymine
  modified_base 1696: mod_base = OTHER; note = thymine
  modified_base 1700: mod_base = OTHER; note = thymine
  modified_base 1702: mod_base = OTHER; note = thymine
  modified_base 1705: mod_base = OTHER; note = thymine
  modified_base 1718: mod_base = OTHER; note = thymine
  modified_base 1724: mod_base = OTHER; note = thymine
  modified_base 1727: mod_base = OTHER; note = thymine
  modified_base 1733: mod_base = OTHER; note = thymine
  modified_base 1747: mod_base = OTHER; note = thymine
  modified_base 1751: mod_base = OTHER; note = thymine
  modified_base 1757: mod_base = OTHER; note = thymine
  modified_base 1769: mod_base = OTHER; note = thymine
  modified_base 1774..1775: mod_base = OTHER; note = thymine
  modified_base 1777: mod_base = OTHER; note = thymine
  modified_base 1786: mod_base = OTHER; note = thymine
  modified_base 1795: mod_base = OTHER; note = thymine
  modified_base 1798..1799: mod_base = OTHER; note = thymine
  modified_base 1811: mod_base = OTHER; note = thymine
  modified_base 1814: mod_base = OTHER; note = thymine
  modified_base 1817: mod_base = OTHER; note = thymine
  modified_base 1820: mod_base = OTHER; note = thymine
  modified_base 1825: mod_base = OTHER; note = thymine
  modified_base 1858: mod_base = OTHER; note = thymine
  modified_base 1864: mod_base = OTHER; note = thymine
  modified_base 1867..1868: mod_base = OTHER; note = thymine
  modified_base 1885: mod_base = OTHER; note = thymine
  modified_base 1894: mod_base = OTHER; note = thymine
  modified_base 1903..1904: mod_base = OTHER; note = thymine
  modified_base 1916: mod_base = OTHER; note = thymine
  modified_base 1924: mod_base = OTHER; note = thymine
  modified_base 1930..1931: mod_base = OTHER; note = thymine
  modified_base 1939: mod_base = OTHER; note = thymine
  modified_base 1955: mod_base = OTHER; note = thymine
  modified_base 1958: mod_base = OTHER; note = thymine
  modified_base 1961: mod_base = OTHER; note = thymine
  modified_base 1969..1970: mod_base = OTHER; note = thymine
  modified_base 1984..1985: mod_base = OTHER; note = thymine
  modified_base 1993: mod_base = OTHER; note = thymine
  modified_base 2000: mod_base = OTHER; note = thymine
  modified_base 2014: mod_base = OTHER; note = thymine
  modified_base 2018: mod_base = OTHER; note = thymine
  modified_base 2026..2027: mod_base = OTHER; note = thymine
  modified_base 2030: mod_base = OTHER; note = thymine
  modified_base 2032: mod_base = OTHER; note = thymine
  modified_base 2038..2039: mod_base = OTHER; note = thymine
  modified_base 2042: mod_base = OTHER; note = thymine
  modified_base 2054: mod_base = OTHER; note = thymine
  modified_base 2057: mod_base = OTHER; note = thymine
  modified_base 2060: mod_base = OTHER; note = thymine
  modified_base 2084: mod_base = OTHER; note = thymine
  modified_base 2086..2087: mod_base = OTHER; note = thymine
  modified_base 2092: mod_base = OTHER; note = thymine
  modified_base 2105: mod_base = OTHER; note = thymine
  modified_base 2114: mod_base = OTHER; note = thymine
  modified_base 2117: mod_base = OTHER; note = thymine
  modified_base 2125..2126: mod_base = OTHER; note = thymine
  modified_base 2128: mod_base = OTHER; note = thymine
  modified_base 2135: mod_base = OTHER; note = thymine
  modified_base 2144: mod_base = OTHER; note = thymine
  modified_base 2174: mod_base = OTHER; note = thymine
  modified_base 2183: mod_base = OTHER; note = thymine
  modified_base 2186: mod_base = OTHER; note = thymine
  modified_base 2189: mod_base = OTHER; note = thymine
  modified_base 2194: mod_base = OTHER; note = thymine
  modified_base 2197: mod_base = OTHER; note = thymine
  modified_base 2204: mod_base = OTHER; note = thymine
  modified_base 2210: mod_base = OTHER; note = thymine
  modified_base 2222: mod_base = OTHER; note = thymine
  modified_base 2230..2231: mod_base = OTHER; note = thymine
  modified_base 2234: mod_base = OTHER; note = thymine
  modified_base 2239: mod_base = OTHER; note = thymine
  modified_base 2249: mod_base = OTHER; note = thymine
  modified_base 2257..2258: mod_base = OTHER; note = thymine
  modified_base 2273: mod_base = OTHER; note = thymine
  modified_base 2294: mod_base = OTHER; note = thymine
  modified_base 2297: mod_base = OTHER; note = thymine
  modified_base 2314..2315: mod_base = OTHER; note = thymine
  modified_base 2326: mod_base = OTHER; note = thymine
  modified_base 2332..2333: mod_base = OTHER; note = thymine
  modified_base 2335..2336: mod_base = OTHER; note = thymine
  modified_base 2348: mod_base = OTHER; note = thymine
  modified_base 2351: mod_base = OTHER; note = thymine
  modified_base 2354: mod_base = OTHER; note = thymine
  modified_base 2360: mod_base = OTHER; note = thymine
  modified_base 2362..2363: mod_base = OTHER; note = thymine
  modified_base 2389..2390: mod_base = OTHER; note = thymine
  modified_base 2417: mod_base = OTHER; note = thymine
  modified_base 2426: mod_base = OTHER; note = thymine
  modified_base 2429: mod_base = OTHER; note = thymine
  modified_base 2441: mod_base = OTHER; note = thymine
  modified_base 2443: mod_base = OTHER; note = thymine
  modified_base 2446: mod_base = OTHER; note = thymine
  modified_base 2462: mod_base = OTHER; note = thymine
  modified_base 2470: mod_base = OTHER; note = thymine
  modified_base 2474: mod_base = OTHER; note = thymine
  modified_base 2483: mod_base = OTHER; note = thymine
  modified_base 2485..2486: mod_base = OTHER; note = thymine
  modified_base 2489: mod_base = OTHER; note = thymine
  modified_base 2491: mod_base = OTHER; note = thymine
  modified_base 2513: mod_base = OTHER; note = thymine
  modified_base 2515: mod_base = OTHER; note = thymine
  modified_base 2537: mod_base = OTHER; note = thymine
  modified_base 2542: mod_base = OTHER; note = thymine
  modified_base 2554..2555: mod_base = OTHER; note = thymine
  modified_base 2558: mod_base = OTHER; note = thymine
  modified_base 2576: mod_base = OTHER; note = thymine
  modified_base 2578: mod_base = OTHER; note = thymine
  modified_base 2582: mod_base = OTHER; note = thymine
  modified_base 2591: mod_base = OTHER; note = thymine
  modified_base 2593: mod_base = OTHER; note = thymine
  modified_base 2597: mod_base = OTHER; note = thymine
  modified_base 2606: mod_base = OTHER; note = thymine
  modified_base 2612: mod_base = OTHER; note = thymine
  modified_base 2621: mod_base = OTHER; note = thymine
  modified_base 2630: mod_base = OTHER; note = thymine
  modified_base 2633: mod_base = OTHER; note = thymine
  modified_base 2638: mod_base = OTHER; note = thymine
  modified_base 2657: mod_base = OTHER; note = thymine
  modified_base 2663: mod_base = OTHER; note = thymine
  modified_base 2665: mod_base = OTHER; note = thymine
  modified_base 2675: mod_base = OTHER; note = thymine
  modified_base 2687: mod_base = OTHER; note = thymine
  modified_base 2695: mod_base = OTHER; note = thymine
  modified_base 2719..2720: mod_base = OTHER; note = thymine
  modified_base 2740..2741: mod_base = OTHER; note = thymine
  modified_base 2743: mod_base = OTHER; note = thymine
  modified_base 2762: mod_base = OTHER; note = thymine
  modified_base 2765: mod_base = OTHER; note = thymine
  modified_base 2774: mod_base = OTHER; note = thymine
  modified_base 2780: mod_base = OTHER; note = thymine
  modified_base 2797: mod_base = OTHER; note = thymine
  modified_base 2804: mod_base = OTHER; note = thymine
  modified_base 2807: mod_base = OTHER; note = thymine
  modified_base 2810: mod_base = OTHER; note = thymine
  modified_base 2827: mod_base = OTHER; note = thymine
  modified_base 2834: mod_base = OTHER; note = thymine
  modified_base 2852: mod_base = OTHER; note = thymine
  modified_base 2855: mod_base = OTHER; note = thymine
  modified_base 2861: mod_base = OTHER; note = thymine
  modified_base 2867: mod_base = OTHER; note = thymine
  modified_base 2869..2870: mod_base = OTHER; note = thymine
  modified_base 2872: mod_base = OTHER; note = thymine
  modified_base 2879: mod_base = OTHER; note = thymine
  modified_base 2902: mod_base = OTHER; note = thymine
  modified_base 2905..2906: mod_base = OTHER; note = thymine
  modified_base 2909: mod_base = OTHER; note = thymine
  modified_base 2912: mod_base = OTHER; note = thymine
  modified_base 2918: mod_base = OTHER; note = thymine
  modified_base 2920: mod_base = OTHER; note = thymine
  modified_base 2926: mod_base = OTHER; note = thymine
  modified_base 2933: mod_base = OTHER; note = thymine
  modified_base 2945: mod_base = OTHER; note = thymine
  modified_base 2948: mod_base = OTHER; note = thymine
  modified_base 2957: mod_base = OTHER; note = thymine
  modified_base 2962: mod_base = OTHER; note = thymine
  modified_base 2971: mod_base = OTHER; note = thymine
  modified_base 2978: mod_base = OTHER; note = thymine
  modified_base 2986: mod_base = OTHER; note = thymine
  modified_base 2989: mod_base = OTHER; note = thymine
  modified_base 2995..2996: mod_base = OTHER; note = thymine
  modified_base 2998: mod_base = OTHER; note = thymine
  modified_base 3001..3002: mod_base = OTHER; note = thymine
  modified_base 3004: mod_base = OTHER; note = thymine
  modified_base 3008: mod_base = OTHER; note = thymine
  modified_base 3016: mod_base = OTHER; note = thymine
  modified_base 3023: mod_base = OTHER; note = thymine
  modified_base 3026: mod_base = OTHER; note = thymine
  modified_base 3031..3032: mod_base = OTHER; note = thymine
  modified_base 3049: mod_base = OTHER; note = thymine
  modified_base 3056: mod_base = OTHER; note = thymine
  modified_base 3061..3062: mod_base = OTHER; note = thymine
  modified_base 3067: mod_base = OTHER; note = thymine
  modified_base 3070: mod_base = OTHER; note = thymine
  modified_base 3074: mod_base = OTHER; note = thymine
  modified_base 3079: mod_base = OTHER; note = thymine
  modified_base 3085: mod_base = OTHER; note = thymine
  modified_base 3088: mod_base = OTHER; note = thymine
  modified_base 3100..3101: mod_base = OTHER; note = thymine
  modified_base 3103: mod_base = OTHER; note = thymine
  modified_base 3107: mod_base = OTHER; note = thymine
  modified_base 3112: mod_base = OTHER; note = thymine
  modified_base 3127: mod_base = OTHER; note = thymine
  modified_base 3142..3143: mod_base = OTHER; note = thymine
  modified_base 3149: mod_base = OTHER; note = thymine
  modified_base 3151: mod_base = OTHER; note = thymine
  modified_base 3164: mod_base = OTHER; note = thymine
  modified_base 3167: mod_base = OTHER; note = thymine
  modified_base 3170: mod_base = OTHER; note = thymine
  modified_base 3173: mod_base = OTHER; note = thymine
  modified_base 3181: mod_base = OTHER; note = thymine
  modified_base 3188: mod_base = OTHER; note = thymine
  modified_base 3197: mod_base = OTHER; note = thymine
  modified_base 3209: mod_base = OTHER; note = thymine
  modified_base 3217: mod_base = OTHER; note = thymine
  modified_base 3224: mod_base = OTHER; note = thymine
  modified_base 3242: mod_base = OTHER; note = thymine
  misc_feature 1..3249: note = Synthetic
  source 1..3249: mol_type = other RNA
atggccgccttcaagcccaaccccatcaactacatcctgggcctggacatcggcatcgcctccgtgggctgggccatggtggagatcgacgaggaggagaaccccatccggctgatcgacctgggcgtgcgggtgttcgagcgggccgaggtgcccaagaccggcgactccctggccatggcccggcggctggcccggtccgtgcggcggctgacccggcggcgggcccaccggctgctgcgggcccggcggctgctgaagcgggagggcgtgctgcaggccgccgacttcgacgagaacggcctgatcaagtccctgcccaacaccccctggcagctgcgggccgccgccctggaccggaagctgacccccctggagtggtccgccgtgctgctgcacctgatcaagcaccggggctacctgtcccagcggaagaacgagggcgagaccgccgacaaggagctgggcgccctgctgaagggcgtggccaacaacgcccacgccctgcagaccggcgacttccggacccccgccgagctggccctgaacaagttcgagaaggagtccggccacatccggaaccagcggggcgactactcccacaccttctcccggaaggacctgcaggccgagctgatcctgctgttcgagaagcagaaggagttcggcaacccccacgtgtccggcggcctgaaggagggcatcgagaccctgctgatgacccagcggcccgccctgtccggcgacgccgtgcagaagatgctgggccactgcaccttcgagcccgccgagcccaaggccgccaagaacacctacaccgccgagcggttcatctggctgaccaagctgaacaacctgcggatcctggagcagggctccgagcggcccctgaccgacaccgagcgggccaccctgatggacgagccctaccggaagtccaagctgacctacgcccaggcccggaagctgctgggcctggaggacaccgccttcttcaagggcctgcggtacggcaaggacaacgccgaggcctccaccctgatggagatgaaggcctaccacgccatctcccgggccctggagaaggagggcctgaaggacaagaagtcccccctgaacctgtcctccgagctgcaggacgagatcggcaccgccttctccctgttcaagaccgacgaggacatcaccggccggctgaaggaccgggtgcagcccgagatcctggaggccctgctgaagcacatctccttcgacaagttcgtgcagatctccctgaaggccctgcggcggatcgtgcccctgatggagcagggcaagcggtacgacgaggcctgcgccgagatctacggcgaccactacggcaagaagaacaccgaggagaagatctacctgccccccatccccgccgacgagatccggaaccccgtggtgctgcgggccctgtcccaggcccggaaggtgatcaacggcgtggtgcggcggtacggctcccccgcccggatccacatcgagaccgcccgggaggtgggcaagtccttcaaggaccggaaggagatcgagaagcggcaggaggagaaccggaaggaccgggagaaggccgccgccaagttccgggagtacttccccaacttcgtgggcgagcccaagtccaaggacatcctgaagctgcggctgtacgagcagcagcacggcaagtgcctgtactccggcaaggagatcaacctggtgcggctgaacgagaagggctacgtggagatcgaccacgccctgcccttctcccggacctgggacgactccttcaacaacaaggtgctggtgctgggctccgagaaccagaacaagggcaaccagaccccctacgagtacttcaacggcaaggacaactcccgggagtggcaggagttcaaggcccgggtggagacctcccggttcccccggtccaagaagcagcggatcctgctgcagaagttcgacgaggacggcttcaaggagtgcaacctgaacgacacccggtacgtgaaccggttcctgtgccagttcgtggccgaccacatcctgctgaccggcaagggcaagcggcgggtgttcgcctccaacggccagatcaccaacctgctgcggggcttctggggcctgcggaaggtgcgggccgagaacgaccggcaccacgccctggacgccgtggtggtggcctgctccaccgtggccatgcagcagaagatcacccggttcgtgcggtacaaggagatgaacgccttcgacggcaagaccatcgacaaggagaccggcaaggtgctgcaccagaagacccacttcccccagccctgggagttcttcgcccaggaggtgatgatccgggtgttcggcaagcccgacggcaagcccgagttcgaggaggccgacacccccgagaagctgcggaccctgctggccgagaagctgtcctcccggcccgaggccgtgcacgagtacgtgacccccctgttcgtgtcccgggcccccaaccggaagatgtccggcgcccacaaggacaccctgcggtccgccaagcggttcgtgaagcacaacgagaagatctccgtgaagcgggtgtggctgaccgagatcaagctggccgacctggagaacatggtgaactacaagaacggccgggagatcgagctgtacgaggccctgaaggcccggctggaggcctacggcggcaacgccaagcaggccttcgaccccaaggacaaccccttctacaagaagggcggccagctggtgaaggccgtgcgggtggagaagacccaggagtccggcgtgctgctgaacaagaagaacgcctacaccatcgccgacaacggcgacatggtgcgggtggacgtgttctgcaaggtggacaagaagggcaagaaccagtacttcatcgtgcccatctacgcctggcaggtggccgagaacatcctgcccgacatcgactgcaagggctaccggatcgacgactcctacaccttctgcttctccctgcacaagtacgacctgatcgccttccagaaggacgagaagtccaaggtggagttcgcctactacatcaactgcgactcctccaacggccggttctacctggcctggcacgacaagggctccaaggagcagcagttccggatctccacccagaacctggtgctgatccagaagtaccaggtgaacgagctgggcaaggagatccggccctgccggctgaagaagcggccccccgtgcggtga

SEQ ID NO: 254 - RNA, 3249 nt, synthetic construct
  modified_base 2: mod_base = OTHER; note = thymine
  modified_base 10..11: mod_base = OTHER; note = thymine
  modified_base 26: mod_base = OTHER; note = thymine
  modified_base 31: mod_base = OTHER; note = thymine
  modified_base 35: mod_base = OTHER; note = thymine
  modified_base 38: mod_base = OTHER; note = thymine
  modified_base 44: mod_base = OTHER; note = thymine
  modified_base 50: mod_base = OTHER; note = thymine
  modified_base 56: mod_base = OTHER; note = thymine
  modified_base 61: mod_base = OTHER; note = thymine
  modified_base 65: mod_base = OTHER; note = thymine
  modified_base 70: mod_base = OTHER; note = thymine
  modified_base 77: mod_base = OTHER; note = thymine
  modified_base 80: mod_base = OTHER; note = thymine
  modified_base 86: mod_base = OTHER; note = thymine
  modified_base 107: mod_base = OTHER; note = thymine
  modified_base 113: mod_base = OTHER; note = thymine
  modified_base 116: mod_base = OTHER; note = thymine
  modified_base 122: mod_base = OTHER; note = thymine
  modified_base 128: mod_base = OTHER; note = thymine
  modified_base 134: mod_base = OTHER; note = thymine
  modified_base 136..137: mod_base = OTHER; note = thymine
  modified_base 152: mod_base = OTHER; note = thymine
  modified_base 169: mod_base = OTHER; note = thymine
  modified_base 173: mod_base = OTHER; note = thymine
  modified_base 179: mod_base = OTHER; note = thymine
  modified_base 191: mod_base = OTHER; note = thymine
  modified_base 199: mod_base = OTHER; note = thymine
  modified_base 203: mod_base = OTHER; note = thymine
  modified_base 212: mod_base = OTHER; note = thymine
  modified_base 236: mod_base = OTHER; note = thymine
  modified_base 239: mod_base = OTHER; note = thymine
  modified_base 254: mod_base = OTHER; note = thymine
  modified_base 257: mod_base = OTHER; note = thymine
  modified_base 272: mod_base = OTHER; note = thymine
  modified_base 275: mod_base = OTHER; note = thymine
  modified_base 289..290: mod_base = OTHER; note = thymine
  modified_base 305: mod_base = OTHER; note = thymine
  modified_base 308: mod_base = OTHER; note = thymine
  modified_base 313: mod_base = OTHER; note = thymine
  modified_base 317: mod_base = OTHER; note = thymine
  modified_base 331: mod_base = OTHER; note = thymine
  modified_base 338: mod_base = OTHER; note = thymine
  modified_base 353: mod_base = OTHER; note = thymine
  modified_base 365: mod_base = OTHER; note = thymine
  modified_base 374: mod_base = OTHER; note = thymine
  modified_base 379: mod_base = OTHER; note = thymine
  modified_base 382: mod_base = OTHER; note = thymine
  modified_base 389: mod_base = OTHER; note = thymine
  modified_base 392: mod_base = OTHER; note = thymine
  modified_base 395: mod_base = OTHER; note = thymine
  modified_base 401: mod_base = OTHER; note = thymine
  modified_base 404: mod_base = OTHER; note = thymine
  modified_base 418: mod_base = OTHER; note = thymine
  modified_base 422: mod_base = OTHER; note = thymine
  modified_base 424: mod_base = OTHER; note = thymine
  modified_base 464: mod_base = OTHER; note = thymine
  modified_base 473: mod_base = OTHER; note = thymine
  modified_base 476: mod_base = OTHER; note = thymine
  modified_base 485: mod_base = OTHER; note = thymine
  modified_base 506: mod_base = OTHER; note = thymine
  modified_base 520..521: mod_base = OTHER; note = thymine
  modified_base 539: mod_base = OTHER; note = thymine
  modified_base 545: mod_base = OTHER; note = thymine
  modified_base 553..554: mod_base = OTHER; note = thymine
  modified_base 565: mod_base = OTHER; note = thymine
  modified_base 575: mod_base = OTHER; note = thymine
  modified_base 595: mod_base = OTHER; note = thymine
  modified_base 598: mod_base = OTHER; note = thymine
  modified_base 607..608: mod_base = OTHER; note = thymine
  modified_base 610: mod_base = OTHER; note = thymine
  modified_base 623: mod_base = OTHER; note = thymine
  modified_base 635: mod_base = OTHER; note = thymine
  modified_base 638: mod_base = OTHER; note = thymine
  modified_base 641: mod_base = OTHER; note = thymine
  modified_base 644: mod_base = OTHER; note = thymine
  modified_base 646..647: mod_base = OTHER; note = thymine
  modified_base 664..665: mod_base = OTHER; note = thymine
  modified_base 680: mod_base = OTHER; note = thymine
  modified_base 682: mod_base = OTHER; note = thymine
  modified_base 692: mod_base = OTHER; note = thymine
  modified_base 704: mod_base = OTHER; note = thymine
  modified_base 713: mod_base = OTHER; note = thymine
  modified_base 716: mod_base = OTHER; note = thymine
  modified_base 719: mod_base = OTHER; note = thymine
  modified_base 737: mod_base = OTHER; note = thymine
  modified_base 739: mod_base = OTHER; note = thymine
  modified_base 752: mod_base = OTHER; note = thymine
  modified_base 761: mod_base = OTHER; note = thymine
  modified_base 764: mod_base = OTHER; note = thymine
  modified_base 772: mod_base = OTHER; note = thymine
  modified_base 778..779: mod_base = OTHER; note = thymine
  modified_base 814: mod_base = OTHER; note = thymine
  modified_base 829..830: mod_base = OTHER; note = thymine
  modified_base 833: mod_base = OTHER; note = thymine
  modified_base 835: mod_base = OTHER; note = thymine
  modified_base 839: mod_base = OTHER; note = thymine
  modified_base 848: mod_base = OTHER; note = thymine
  modified_base 857: mod_base = OTHER; note = thymine
  modified_base 863: mod_base = OTHER; note = thymine
  modified_base 866: mod_base = OTHER; note = thymine
  modified_base 877: mod_base = OTHER; note = thymine
  modified_base 890: mod_base = OTHER; note = thymine
  modified_base 914: mod_base = OTHER; note = thymine
  modified_base 917: mod_base = OTHER; note = thymine
  modified_base 928: mod_base = OTHER; note = thymine
  modified_base 937: mod_base = OTHER; note = thymine
  modified_base 944: mod_base = OTHER; note = thymine
  modified_base 949: mod_base = OTHER; note = thymine
  modified_base 968: mod_base = OTHER; note = thymine
  modified_base 971: mod_base = OTHER; note = thymine
  modified_base 977: mod_base = OTHER; note = thymine
  modified_base 991..992: mod_base = OTHER; note = thymine
  modified_base 994..995: mod_base = OTHER; note = thymine
  modified_base 1004: mod_base = OTHER; note = thymine
  modified_base 1009: mod_base = OTHER; note = thymine
  modified_base 1033: mod_base = OTHER; note = thymine
  modified_base 1040: mod_base = OTHER; note = thymine
  modified_base 1043: mod_base = OTHER; note = thymine
  modified_base 1049: mod_base = OTHER; note = thymine
  modified_base 1057: mod_base = OTHER; note = thymine
  modified_base 1067: mod_base = OTHER; note = thymine
  modified_base 1069: mod_base = OTHER; note = thymine
  modified_base 1079: mod_base = OTHER; note = thymine
  modified_base 1094: mod_base = OTHER; note = thymine
  modified_base 1108: mod_base = OTHER; note = thymine
  modified_base 1115: mod_base = OTHER; note = thymine
  modified_base 1121: mod_base = OTHER; note = thymine
  modified_base 1123: mod_base = OTHER; note = thymine
  modified_base 1126: mod_base = OTHER; note = thymine
  modified_base 1133: mod_base = OTHER; note = thymine
  modified_base 1145: mod_base = OTHER; note = thymine
  modified_base 1156..1157: mod_base = OTHER; note = thymine
  modified_base 1159: mod_base = OTHER; note = thymine
  modified_base 1163: mod_base = OTHER; note = thymine
  modified_base 1165..1166: mod_base = OTHER; note = thymine
  modified_base 1184: mod_base = OTHER; note = thymine
  modified_base 1196: mod_base = OTHER; note = thymine
  modified_base 1208: mod_base = OTHER; note = thymine
  modified_base 1220: mod_base = OTHER; note = thymine
  modified_base 1223: mod_base = OTHER; note = thymine
  modified_base 1232: mod_base = OTHER; note = thymine
  modified_base 1235: mod_base = OTHER; note = thymine
  modified_base 1244: mod_base = OTHER; note = thymine
  modified_base 1246: mod_base = OTHER; note = thymine
  modified_base 1249..1250: mod_base = OTHER; note = thymine
  modified_base 1258..1259: mod_base = OTHER; note = thymine
  modified_base 1262: mod_base = OTHER; note = thymine
  modified_base 1268: mod_base = OTHER; note = thymine
  modified_base 1270: mod_base = OTHER; note = thymine
  modified_base 1274: mod_base = OTHER; note = thymine
  modified_base 1283: mod_base = OTHER; note = thymine
  modified_base 1292: mod_base = OTHER; note = thymine
  modified_base 1295: mod_base = OTHER; note = thymine
  modified_base 1301: mod_base = OTHER; note = thymine
  modified_base 1304: mod_base = OTHER; note = thymine
  modified_base 1321: mod_base = OTHER; note = thymine
  modified_base 1333: mod_base = OTHER; note = thymine
  modified_base 1343: mod_base = OTHER; note = thymine
  modified_base 1345: mod_base = OTHER; note = thymine
  modified_base 1357: mod_base = OTHER; note = thymine
  modified_base 1385: mod_base = OTHER; note = thymine
  modified_base 1387: mod_base = OTHER; note = thymine
  modified_base 1391: mod_base = OTHER; note = thymine
  modified_base 1400: mod_base = OTHER; note = thymine
  modified_base 1415: mod_base = OTHER; note = thymine
  modified_base 1427: mod_base = OTHER; note = thymine
  modified_base 1430: mod_base = OTHER; note = thymine
  modified_base 1433: mod_base = OTHER; note = thymine
  modified_base 1442: mod_base = OTHER; note = thymine
  modified_base 1444: mod_base = OTHER; note = thymine
  modified_base 1460: mod_base = OTHER; note = thymine
  modified_base 1463: mod_base = OTHER; note = thymine
  modified_base 1472: mod_base = OTHER; note = thymine
  modified_base 1475: mod_base = OTHER; note = thymine
  modified_base 1483: mod_base = OTHER; note = thymine
  modified_base 1489: mod_base = OTHER; note = thymine
  modified_base 1502: mod_base = OTHER; note = thymine
  modified_base 1508: mod_base = OTHER; note = thymine
  modified_base 1526: mod_base = OTHER; note = thymine
  modified_base 1534: mod_base = OTHER; note = thymine
  modified_base 1537..1538: mod_base = OTHER; note = thymine
  modified_base 1556: mod_base = OTHER; note = thymine
  modified_base 1609..1610: mod_base = OTHER; note = thymine
  modified_base 1618: mod_base = OTHER; note = thymine
  modified_base 1621..1622: mod_base = OTHER; note = thymine
  modified_base 1630..1631: mod_base = OTHER; note = thymine
  modified_base 1634: mod_base = OTHER; note = thymine
  modified_base 1648: mod_base = OTHER; note = thymine
  modified_base 1658: mod_base = OTHER; note = thymine
  modified_base 1661: mod_base = OTHER; note = thymine
  modified_base 1667: mod_base = OTHER; note = thymine
  modified_base 1673: mod_base = OTHER; note = thymine
  modified_base 1675: mod_base = OTHER; note = thymine
  modified_base 1696: mod_base = OTHER; note = thymine
  modified_base 1700: mod_base = OTHER; note = thymine
  modified_base 1702: mod_base = OTHER; note = thymine
  modified_base 1705: mod_base = OTHER; note = thymine
  modified_base 1718: mod_base = OTHER; note = thymine
  modified_base 1724: mod_base = OTHER; note = thymine
  modified_base 1727: mod_base = OTHER; note = thymine
  modified_base 1733: mod_base = OTHER; note = thymine
  modified_base 1747: mod_base = OTHER; note = thymine
  modified_base 1751: mod_base = OTHER; note = thymine
  modified_base 1757: mod_base = OTHER; note = thymine
  modified_base 1769: mod_base = OTHER; note = thymine
  modified_base 1774..1775: mod_base = OTHER; note = thymine
  modified_base 1777: mod_base = OTHER; note = thymine
  modified_base 1786: mod_base = OTHER; note = thymine
  modified_base 1795: mod_base = OTHER; note = thymine
  modified_base 1798..1799: mod_base = OTHER; note = thymine
  modified_base 1811: mod_base = OTHER; note = thymine
  modified_base 1814: mod_base = OTHER; note = thymine
  modified_base 1817: mod_base = OTHER; note = thymine
  modified_base 1820: mod_base = OTHER; note = thymine
  modified_base 1825: mod_base = OTHER; note = thymine
  modified_base 1858: mod_base = OTHER; note = thymine
  modified_base 1864: mod_base = OTHER; note = thymine
  modified_base 1867..1868: mod_base = OTHER; note = thymine
  modified_base 1885: mod_base = OTHER; note = thymine
  modified_base 1894: mod_base = OTHER; note = thymine
  modified_base 1903..1904: mod_base = OTHER; note = thymine
  modified_base 1916: mod_base = OTHER; note = thymine
  modified_base 1924: mod_base = OTHER; note = thymine
  modified_base 1930..1931: mod_base = OTHER; note = thymine
  modified_base 1939: mod_base = OTHER; note = thymine
  modified_base 1955: mod_base = OTHER; note = thymine
  modified_base 1958: mod_base = OTHER; note = thymine
  modified_base 1961: mod_base = OTHER; note = thymine
  modified_base 1969..1970: mod_base = OTHER; note = thymine
  modified_base 1984..1985: mod_base = OTHER; note = thymine
  modified_base 1993: mod_base = OTHER; note = thymine
  modified_base 2000: mod_base = OTHER; note = thymine
  modified_base 2014: mod_base = OTHER; note = thymine
  modified_base 2018: mod_base = OTHER; note = thymine
  modified_base 2026..2027: mod_base = OTHER; note = thymine
  modified_base 2030: mod_base = OTHER; note = thymine
  modified_base 2032: mod_base = OTHER; note = thymine
  modified_base 2038..2039: mod_base = OTHER; note = thymine
  modified_base 2042: mod_base = OTHER; note = thymine
  modified_base 2054: mod_base = OTHER; note = thymine
  modified_base 2057: mod_base = OTHER; note = thymine
  modified_base 2060: mod_base = OTHER; note = thymine
  modified_base 2084: mod_base = OTHER; note = thymine
  modified_base 2086..2087: mod_base = OTHER; note = thymine
  modified_base 2092: mod_base = OTHER; note = thymine
  modified_base 2105: mod_base = OTHER; note = thymine
  modified_base 2114: mod_base = OTHER; note = thymine
  modified_base 2117: mod_base = OTHER; note = thymine
  modified_base 2125..2126: mod_base = OTHER; note = thymine
  modified_base 2128: mod_base = OTHER; note = thymine
  modified_base 2135: mod_base = OTHER; note = thymine
  modified_base 2144: mod_base = OTHER; note = thymine
  modified_base 2174: mod_base = OTHER; note = thymine
  modified_base 2183: mod_base = OTHER; note = thymine
  modified_base 2186: mod_base = OTHER; note = thymine
  modified_base 2189: mod_base = OTHER; note = thymine
  modified_base 2194: mod_base = OTHER; note = thymine
  modified_base 2197: mod_base = OTHER; note = thymine
  modified_base 2204: mod_base = OTHER; note = thymine
  modified_base 2210: mod_base = OTHER; note = thymine
  modified_base 2222: mod_base = OTHER; note = thymine
  modified_base 2230..2231: mod_base = OTHER; note = thymine
  modified_base 2234: mod_base = OTHER; note = thymine
  modified_base 2239: mod_base = OTHER; note = thymine
  modified_base 2249: mod_base = OTHER; note = thymine
  modified_base 2257..2258: mod_base = OTHER; note = thymine
  modified_base 2273: mod_base = OTHER; note = thymine
  modified_base 2294: mod_base = OTHER; note = thymine
  modified_base 2297: mod_base = OTHER; note = thymine
  modified_base 2314..2315: mod_base = OTHER; note = thymine
  modified_base 2326: mod_base = OTHER; note = thymine
  modified_base 2332..2333: mod_base = OTHER; note = thymine
  modified_base 2335..2336: mod_base = OTHER; note = thymine
  modified_base 2348: mod_base = OTHER; note = thymine
  modified_base 2351: mod_base = OTHER; note = thymine
  modified_base 2354: mod_base = OTHER; note = thymine
  modified_base 2360: mod_base = OTHER; note = thymine
  modified_base 2362..2363: mod_base = OTHER; note = thymine
  modified_base 2389..2390: mod_base = OTHER; note = thymine
  modified_base 2417: mod_base = OTHER; note = thymine
  modified_base 2426: mod_base = OTHER; note = thymine
  modified_base 2429: mod_base = OTHER; note = thymine
  modified_base 2441: mod_base = OTHER; note = thymine
  modified_base 2443: mod_base = OTHER; note = thymine
  modified_base 2446: mod_base = OTHER; note = thymine
  modified_base 2462: mod_base = OTHER; note = thymine
  modified_base 2470: mod_base = OTHER; note = thymine
  modified_base 2474: mod_base = OTHER; note = thymine
  modified_base 2483: mod_base = OTHER; note = thymine
  modified_base 2485..2486: mod_base = OTHER; note = thymine
  modified_base 2489: mod_base = OTHER; note = thymine
  modified_base 2491: mod_base = OTHER; note = thymine
  modified_base 2513: mod_base = OTHER; note = thymine
  modified_base 2515: mod_base = OTHER; note = thymine
  modified_base 2537: mod_base = OTHER; note = thymine
  modified_base 2542: mod_base = OTHER; note = thymine
  modified_base 2554..2555: mod_base = OTHER; note = thymine
  modified_base 2558: mod_base = OTHER; note = thymine
  modified_base 2576: mod_base = OTHER; note = thymine
  modified_base 2578: mod_base = OTHER; note = thymine
  modified_base 2582: mod_base = OTHER; note = thymine
  modified_base 2591: mod_base = OTHER; note = thymine
  modified_base 2593: mod_base = OTHER; note = thymine
  modified_base 2597: mod_base = OTHER; note = thymine
  modified_base 2606: mod_base = OTHER; note = thymine
  modified_base 2612: mod_base = OTHER; note = thymine
  modified_base 2621: mod_base = OTHER; note = thymine
  modified_base 2630: mod_base = OTHER; note = thymine
  modified_base 2633: mod_base = OTHER; note = thymine
  modified_base 2638: mod_base = OTHER; note = thymine
  modified_base 2657: mod_base = OTHER; note = thymine
  modified_base 2663: mod_base = OTHER; note = thymine
  modified_base 2665: mod_base = OTHER; note = thymine
  modified_base 2675: mod_base = OTHER; note = thymine
  modified_base 2687: mod_base = OTHER; note = thymine
  modified_base 2695: mod_base = OTHER; note = thymine
  modified_base 2719..2720: mod_base = OTHER; note = thymine
  modified_base 2740..2741: mod_base = OTHER; note = thymine
  modified_base 2743: mod_base = OTHER; note = thymine
  modified_base 2762: mod_base = OTHER; note = thymine
  modified_base 2765: mod_base = OTHER; note = thymine
  modified_base 2774: mod_base = OTHER; note = thymine
  modified_base 2780: mod_base = OTHER; note = thymine
  modified_base 2797: mod_base = OTHER; note = thymine
  modified_base 2804: mod_base = OTHER; note = thymine
  modified_base 2807: mod_base = OTHER; note = thymine
  modified_base 2810: mod_base = OTHER; note = thymine
  modified_base 2827: mod_base = OTHER; note = thymine
  modified_base 2834: mod_base = OTHER; note = thymine
  modified_base 2852: mod_base = OTHER; note = thymine
  modified_base 2855: mod_base = OTHER; note = thymine
  modified_base 2861: mod_base = OTHER; note = thymine
  modified_base 2867: mod_base = OTHER; note = thymine
  modified_base 2869..2870: mod_base = OTHER; note = thymine
  modified_base 2872: mod_base = OTHER; note = thymine
  modified_base 2879: mod_base = OTHER; note = thymine
  modified_base 2902: mod_base = OTHER; note = thymine
  modified_base 2905..2906: mod_base = OTHER; note = thymine
  modified_base 2909: mod_base = OTHER; note = thymine
  modified_base 2912: mod_base = OTHER; note = thymine
  modified_base 2918: mod_base = OTHER; note = thymine
  modified_base 2920: mod_base = OTHER; note = thymine
  modified_base 2926: mod_base = OTHER; note = thymine
  modified_base 2933: mod_base = OTHER; note = thymine
  modified_base 2945: mod_base = OTHER; note = thymine
  modified_base 2948: mod_base = OTHER; note = thymine
  modified_base 2957: mod_base = OTHER; note = thymine
  modified_base 2962: mod_base = OTHER; note = thymine
  modified_base 2971: mod_base = OTHER; note = thymine
  modified_base 2978: mod_base = OTHER; note = thymine
  modified_base 2986: mod_base = OTHER; note = thymine
  modified_base 2989: mod_base = OTHER; note = thymine
  modified_base 2995..2996: mod_base = OTHER; note = thymine
  modified_base 2998: mod_base = OTHER; note = thymine
  modified_base 3001..3002: mod_base = OTHER; note = thymine
  modified_base 3004: mod_base = OTHER; note = thymine
  modified_base 3008: mod_base = OTHER; note = thymine
  modified_base 3016: mod_base = OTHER; note = thymine
  modified_base 3023: mod_base = OTHER; note = thymine
  modified_base 3026: mod_base = OTHER; note = thymine
  modified_base 3031..3032: mod_base = OTHER; note = thymine
  modified_base 3049: mod_base = OTHER; note = thymine
  modified_base 3056: mod_base = OTHER; note = thymine
  modified_base 3061..3062: mod_base = OTHER; note = thymine
  modified_base 3067: mod_base = OTHER; note = thymine
  modified_base 3070: mod_base = OTHER; note = thymine
  modified_base 3074: mod_base = OTHER; note = thymine
  modified_base 3079: mod_base = OTHER; note = thymine
  modified_base 3085: mod_base = OTHER; note = thymine
  modified_base 3088: mod_base = OTHER; note = thymine
  modified_base 3100..3101: mod_base = OTHER; note = thymine
  modified_base 3103: mod_base = OTHER; note = thymine
  modified_base 3107: mod_base = OTHER; note = thymine
  modified_base 3112: mod_base = OTHER; note = thymine
  modified_base 3127: mod_base = OTHER; note = thymine
  modified_base 3142..3143: mod_base = OTHER; note = thymine
  modified_base 3149: mod_base = OTHER; note = thymine
  modified_base 3151: mod_base = OTHER; note = thymine
  modified_base 3164: mod_base = OTHER; note = thymine
  modified_base 3167: mod_base = OTHER; note = thymine
  modified_base 3170: mod_base = OTHER; note = thymine
  modified_base 3173: mod_base = OTHER; note = thymine
  modified_base 3181: mod_base = OTHER; note = thymine
  modified_base 3188: mod_base = OTHER; note = thymine
  modified_base 3197: mod_base = OTHER; note = thymine
  modified_base 3209: mod_base = OTHER; note = thymine
  modified_base 3217: mod_base = OTHER; note = thymine
  modified_base 3224: mod_base = OTHER; note = thymine
  modified_base 3242: mod_base = OTHER; note = thymine
  misc_feature 1..3249: note = Synthetic
  source 1..3249: mol_type = other RNA
atggcagcattcaaaccaaacccaatcaactacatcctaggactagacatcggaatcgcatcagtaggatgagcaatggtagaaatcgacgaagaagaaaacccaatccgactaatcgacctaggagtacgagtattcgaacgagcagaagtaccaaaaacaggagactcactagcaatggcacgacgactagcacgatcagtacgacgactaacacgacgacgagcacaccgactactacgagcacgacgactactaaaacgagaaggagtactacaagcagcagacttcgacgaaaacggactaatcaaatcactaccaaacacaccatgacaactacgagcagcagcactagaccgaaaactaacaccactagaatgatcagcagtactactacacctaatcaaacaccgaggatacctatcacaacgaaaaaacgaaggagaaacagcagacaaagaactaggagcactactaaaaggagtagcaaacaacgcacacgcactacaaacaggagacttccgaacaccagcagaactagcactaaacaaattcgaaaaagaatcaggacacatccgaaaccaacgaggagactactcacacacattctcacgaaaagacctacaagcagaactaatcctactattcgaaaaacaaaaagaattcggaaacccacacgtatcaggaggactaaaagaaggaatcgaaacactactaatgacacaacgaccagcactatcaggagacgcagtacaaaaaatgctaggacactgcacattcgaaccagcagaaccaaaagcagcaaaaaacacatacacagcagaacgattcatctgactaacaaaactaaacaacctacgaatcctagaacaaggatcagaacgaccactaacagacacagaacgagcaacactaatggacgaaccataccgaaaatcaaaactaacatacgcacaagcacgaaaactactaggactagaagacacagcattcttcaaaggactacgatacggaaaagacaacgcagaagcatcaacactaatggaaatgaaagcataccacgcaatctcacgagcactagaaaaagaaggactaaaagacaaaaaatcaccactaaacctatcatcagaactacaagacgaaatcggaacagcattctcactattcaaaacagacgaagacatcacaggacgactaaaagaccgagtacaaccagaaatcctagaagcactactaaaacacatctcattcgacaaattcgtacaaatctcactaaaagcactacgacgaatcgtaccactaatggaacaaggaaaacgatacgacgaagcatgcgcagaaatctacggagaccactacggaaaaaaaaacacagaagaaaaaatctacctaccaccaatcccagcagacgaaatccgaaacccagtagtactacgagcactatcacaagcacgaaaagtaatcaacggagtagtacgacgatacggatcaccagcacgaatccacatcgaaacagcacgagaagtaggaaaatcattcaaagaccgaaaagaaatcgaaaaacgacaagaagaaaaccgaaaagaccgagaaaaagcagcagcaaaattccgagaatacttcccaaacttcgtaggagaaccaaaatcaaaagacatcctaaaactacgactatacgaacaacaacacggaaaatgcctatactcaggaaaagaaatcaacctagtacgactaaacgaaaaaggatacgtagaaatcgaccacgcactaccattctcacgaacatgagacgactcattcaacaacaaagtactagtactaggatcagaaaaccaaaacaaaggaaaccaaacaccatacgaatacttcaacggaaaagacaactcacgagaatgacaagaattcaaagcacgagtagaaacatcacgattcccacgatcaaaaaaacaacgaatcctactacaaaaattcgacgaagacggattcaaagaatgcaacctaaacgacacacgatacgtaaaccgattcctatgccaattcgtagcagaccacatcctactaacaggaaaaggaaaacgacgagtattcgcatcaaacggacaaatcacaaacctactacgaggattctgaggactacgaaaagtacgagcagaaaacgaccgacaccacgcactagacgcagtagtagtagcatgctcaacagtagcaatgcaacaaaaaatcacacgattcgtacgatacaaagaaatgaacgcattcgacggaaaaacaatcgacaaagaaacaggaaaagtactacaccaaaaaacacacttcccacaaccatgagaattcttcgcacaagaagtaatgatccgagtattcggaaaaccagacggaaaaccagaattcgaagaagcagacacaccagaaaaactacgaacactactagcagaaaaactatcatcacgaccagaagcagtacacgaatacgtaacaccactattcgtatcacgagcaccaaaccgaaaaatgtcaggagcacacaaagacacactacgatcagcaaaacgattcgtaaaacacaacgaaaaaatctcagtaaaacgagtatgactaacagaaatcaaactagcagacctagaaaacatggtaaactacaaaaacggacgagaaatcgaactatacgaagcactaaaagcacgactagaagcatacggaggaaacgcaaaacaagcattcgacccaaaagacaacccattctacaaaaaaggaggacaactagtaaaagcagtacgagtagaaaaaacacaagaatcaggagtactactaaacaaaaaaaacgcatacacaatcgcagacaacggagacatggtacgagtagacgtattctgcaaagtagacaaaaaaggaaaaaaccaatacttcatcgtaccaatctacgcatgacaagtagcagaaaacatcctaccagacatcgactgcaaaggataccgaatcgacgactcatacacattctgcttctcactacacaaatacgacctaatcgcattccaaaaagacgaaaaatcaaaagtagaattcgcatactacatcaactgcgactcatcaaacggacgattctacctagcatgacacgacaaaggatcaaaagaacaacaattccgaatctcaacacaaaacctagtactaatccaaaaataccaagtaaacgaactaggaaaagaaatccgaccatgccgactaaaaaaacgaccaccagtacgataa

SEQ ID NO: 255 - protein, 1082 aa, synthetic construct
  REGION 1..1082: note = Synthetic
MAAFKPNPINYILGLAIGIASVGWAMVEIDEEENPIRLIDLGVRVFERAEVPKTGDSLAMARRLARSVRRLTRRRAHRLLRARRLLKREGVLQAADFDENGLIKSLPNTPWQLRAAALDRKLTPLEWSAVLLHLIKHRGYLSQRKNEGETADKELGALLKGVANNAHALQTGDFRTPAELALNKFEKESGHIRNQRGDYSHTFSRKDLQAELILLFEKQKEFGNPHVSGGLKEGIETLLMTQRPALSGDAVQKMLGHCTFEPAEPKAAKNTYTAERFIWLTKLNNLRILEQGSERPLTDTERATLMDEPYRKSKLTYAQARKLLGLEDTAFFKGLRYGKDNAEASTLMEMKAYHAISRALEKEGLKDKKSPLNLSSELQDEIGTAFSLFKTDEDITGRLKDRVQPEILEALLKHISFDKFVQISLKALRRIVPLMEQGKRYDEACAEIYGDHYGKKNTEEKIYLPPIPADEIRNPVVLRALSQARKVINGVVRRYGSPARIHIETAREVGKSFKDRKEIEKRQEENRKDREKAAAKFREYFPNFVGEPKSKDILKLRLYEQQHGKCLYSGKEINLVRLNEKGYVEIDAALPFSRTWDDSFNNKVLVLGSENQNKGNQTPYEYFNGKDNSREWQEFKARVETSRFPRSKKQRILLQKFDEDGFKECNLNDTRYVNRFLCQFVADHILLTGKGKRRVFASNGQITNLLRGFWGLRKVRAENDRHHALDAVVVACSTVAMQQKITRFVRYKEMNAFDGKTIDKETGKVLHQKTHFPQPWEFFAQEVMIRVFGKPDGKPEFEEADTPEKLRTLLAEKLSSRPEAVHEYVTPLFVSRAPNRKMSGAHKDTLRSAKRFVKHNEKISVKRVWLTEIKLADLENMVNYKNGREIELYEALKARLEAYGGNAKQAFDPKDNPFYKKGGQLVKAVRVEKTQESGVLLNKKNAYTIADNGDMVRVDVFCKVDKKGKNQYFIVPIYAWQVAENILPDIDCKGYRIDDSYTFCFSLHKYDLIAFQKDEKSKVEFAYYINCDSSNGRFYLAWHDKGSKEQQFRISTQNLVLIQKYQVNELGKEIRPCRLKKRPPVR

SEQ ID NO: 256 - DNA, 3243 bp, synthetic construct
  misc_feature 1..3243: note = Synthetic
  source 1..3243: mol_type = other DNA
gctgcttttaagcctaatcctattaattatattcttggtcttgctattggtattgcttctgttggttgggctatggttgagattgatgaggaggagaatcctattcgtcttattgatcttggtgttcgtgtttttgagcgtgctgaggttcctaagactggtgattctcttgctatggctcgtcgtcttgctcgttctgttcgtcgtcttactcgtcgtcgtgctcatcgtcttcttcgtgctcgtcgtcttcttaagcgtgagggtgttcttcaggctgctgattttgatgagaatggtcttattaagtctcttcctaatactccttggcagcttcgtgctgctgctcttgatcgtaagcttactcctcttgagtggtctgctgttcttcttcatcttattaagcatcgtggttatctttctcagcgtaagaatgagggtgagactgctgataaggagcttggtgctcttcttaagggtgttgctaataatgctcatgctcttcagactggtgattttcgtactcctgctgagcttgctcttaataagtttgagaaggagtctggtcatattcgtaatcagcgtggtgattattctcatactttttctcgtaaggatcttcaggctgagcttattcttctttttgagaagcagaaggagtttggtaatcctcatgtttctggtggtcttaaggagggtattgagactcttcttatgactcagcgtcctgctctttctggtgatgctgttcagaagatgcttggtcattgtacttttgagcctgctgagcctaaggctgctaagaatacttatactgctgagcgttttatttggcttactaagcttaataatcttcgtattcttgagcagggttctgagcgtcctcttactgatactgagcgtgctactcttatggatgagccttatcgtaagtctaagcttacttatgctcaggctcgtaagcttcttggtcttgaggatactgctttttttaagggtcttcgttatggtaaggataatgctgaggcttctactcttatggagatgaaggcttatcatgctatttctcgtgctcttgagaaggagggtcttaaggataagaagtctcctcttaatctttcttctgagcttcaggatgagattggtactgctttttctctttttaagactgatgaggatattactggtcgtcttaaggatcgtgttcagcctgagattcttgaggctcttcttaagcatatttcttttgataagtttgttcagatttctcttaaggctcttcgtcgtattgttcctcttatggagcagggtaagcgttatgatgaggcttgtgctgagatttatggtgatcattatggtaagaagaatactgaggagaagatttatcttcctcctattcctgctgatgagattcgtaatcctgttgttcttcgtgctctttctcaggctcgtaaggttattaatggtgttgttcgtcgttatggttctcctgctcgtattcatattgagactgctcgtgaggttggtaagtcttttaaggatcgtaaggagattgagaagcgtcaggaggagaatcgtaaggatcgtgagaaggctgctgctaagtttcgtgagtattttcctaattttgttggtgagcctaagtctaaggatattcttaagcttcgtctttatgagcagcagcatggtaagtgtctttattctggtaaggagattaatcttgttcgtcttaatgagaagggttatgttgagattgatgctgctcttcctttttctcgtacttgggatgattcttttaataataaggttcttgttcttggttctgagaatcagaataagggtaatcagactccttatgagtattttaatggtaaggataattctcgtgagtggcaggagtttaaggctcgtgttgagacttctcgttttcctcgttctaagaagcagcgtattcttcttcagaagtttgatgaggatggttttaaggagtgtaatcttaatgatactcgttatgttaatcgttttctttgtcagtttgttgctgatcatattcttcttactggtaagggtaagcgtcgtgtttttgcttctaatggtcagattactaatcttcttcgtggtttttggggtcttcgtaaggttcgtgctgagaatgatcgtcatcatgctcttgatgctgttgttgttgcttgttctactgttgctatgcagcagaagattactcgttttgttcgttataaggagatgaatgcttttgatggtaagactattgataaggagactggtaaggttcttcatcagaagactcattttcctcagccttgggagttttttgctcaggaggttatgattcgtgtttttggtaagcctgatggtaagcctgagtttgaggaggctgatactcctgagaagcttcgtactcttcttgctgagaagctttcttctcgtcctgaggctgttcatgagtatgttactcctctttttgtttctcgtgctcctaatcgtaagatgtctggtgctcataaggatactcttcgttctgctaagcgttttgttaagcataatgagaagatttctgttaagcgtgtttggcttactgagattaagcttgctgatcttgagaatatggttaattataagaatggtcgtgagattgagctttatgaggctcttaaggctcgtcttgaggcttatggtggtaatgctaagcaggcttttgatcctaaggataatcctttttataagaagggtggtcagcttgttaaggctgttcgtgttgagaagactcaggagtctggtgttcttcttaataagaagaatgcttatactattgctgataatggtgatatggttcgtgttgatgttttttgtaaggttgataagaagggtaagaatcagtattttattgttcctatttatgcttggcaggttgctgagaatattcttcctgatattgattgtaagggttatcgtattgatgattcttatactttttgtttttctcttcataagtatgatcttattgcttttcagaaggatgagaagtctaaggttgagtttgcttattatattaattgtgattcttctaatggtcgtttttatcttgcttggcatgataagggttctaaggagcagcagtttcgtatttctactcagaatcttgttcttattcagaagtatcaggttaatgagcttggtaaggagattcgtccttgtcgtcttaagaagcgtcctcctgttcgt

SEQ ID NO: 257 - DNA, 3243 bp, synthetic construct
  misc_feature 1..3243: note = Synthetic
  source 1..3243: mol_type = other DNA
gccgccttcaagcccaaccccatcaactacatcctgggcctggccatcggcatcgcctccgtgggctgggccatggtggagatcgacgaggaggagaaccccatccggctgatcgacctgggcgtgcgggtgttcgagcgggccgaggtgcccaagaccggcgactccctggccatggcccggcggctggcccggtccgtgcggcggctgacccggcggcgggcccaccggctgctgcgggcccggcggctgctgaagcgggagggcgtgctgcaggccgccgacttcgacgagaacggcctgatcaagtccctgcccaacaccccctggcagctgcgggccgccgccctggaccggaagctgacccccctggagtggtccgccgtgctgctgcacctgatcaagcaccggggctacctgtcccagcggaagaacgagggcgagaccgccgacaaggagctgggcgccctgctgaagggcgtggccaacaacgcccacgccctgcagaccggcgacttccggacccccgccgagctggccctgaacaagttcgagaaggagtccggccacatccggaaccagcggggcgactactcccacaccttctcccggaaggacctgcaggccgagctgatcctgctgttcgagaagcagaaggagttcggcaacccccacgtgtccggcggcctgaaggagggcatcgagaccctgctgatgacccagcggcccgccctgtccggcgacgccgtgcagaagatgctgggccactgcaccttcgagcccgccgagcccaaggccgccaagaacacctacaccgccgagcggttcatctggctgaccaagctgaacaacctgcggatcctggagcagggctccgagcggcccctgaccgacaccgagcgggccaccctgatggacgagccctaccggaagtccaagctgacctacgcccaggcccggaagctgctgggcctggaggacaccgccttcttcaagggcctgcggtacggcaaggacaacgccgaggcctccaccctgatggagatgaaggcctaccacgccatctcccgggccctggagaaggagggcctgaaggacaagaagtcccccctgaacctgtcctccgagctgcaggacgagatcggcaccgccttctccctgttcaagaccgacgaggacatcaccggccggctgaaggaccgggtgcagcccgagatcctggaggccctgctgaagcacatctccttcgacaagttcgtgcagatctccctgaaggccctgcggcggatcgtgcccctgatggagcagggcaagcggtacgacgaggcctgcgccgagatctacggcgaccactacggcaagaagaacaccgaggagaagatctacctgccccccatccccgccgacgagatccggaaccccgtggtgctgcgggccctgtcccaggcccggaaggtgatcaacggcgtggtgcggcggtacggctcccccgcccggatccacatcgagaccgcccgggaggtgggcaagtccttcaaggaccggaaggagatcgagaagcggcaggaggagaaccggaaggaccgggagaaggccgccgccaagttccgggagtacttccccaacttcgtgggcgagcccaagtccaaggacatcctgaagctgcggctgtacgagcagcagcacggcaagtgcctgtactccggcaaggagatcaacctggtgcggctgaacgagaagggctacgtggagatcgacgccgccctgcccttctcccggacctgggacgactccttcaacaacaaggtgctggtgctgggctccgagaaccagaacaagggcaaccagaccccctacgagtacttcaacggcaaggacaactcccgggagtggcaggagttcaaggcccgggtggagacctcccggttcccccggtccaagaagcagcggatcctgctgcagaagttcgacgaggacggcttcaaggagtgcaacctgaacgacacccggtacgtgaaccggttcctgtgccagttcgtggccgaccacatcctgctgaccggcaagggcaagcggcgggtgttcgcctccaacggccagatcaccaacctgctgcggggcttctggggcctgcggaaggtgcgggccgagaacgaccggcaccacgccctggacgccgtggtggtggcctgctccaccgtggccatgcagcagaagatcacccggttcgtgcggtacaaggagatgaacgccttcgacggcaagaccatcgacaaggagaccggcaaggtgctgcaccagaagacccacttcccccagccctgggagttcttcgcccaggaggtgatgatccgggtgttcggcaagcccgacggcaagcccgagttcgaggaggccgacacccccgagaagctgcggaccctgctggccgagaagctgtcctcccggcccgaggccgtgcacgagtacgtgacccccctgttcgtgtcccgggcccccaaccggaagatgtccggcgcccacaaggacaccctgcggtccgccaagcggttcgtgaagcacaacgagaagatctccgtgaagcgggtgtggctgaccgagatcaagctggccgacctggagaacatggtgaactacaagaacggccgggagatcgagctgtacgaggccctgaaggcccggctggaggcctacggcggcaacgccaagcaggccttcgaccccaaggacaaccccttctacaagaagggcggccagctggtgaaggccgtgcgggtggagaagacccaggagtccggcgtgctgctgaacaagaagaacgcctacaccatcgccgacaacggcgacatggtgcgggtggacgtgttctgcaaggtggacaagaagggcaagaaccagtacttcatcgtgcccatctacgcctggcaggtggccgagaacatcctgcccgacatcgactgcaagggctaccggatcgacgactcctacaccttctgcttctccctgcacaagtacgacctgatcgccttccagaaggacgagaagtccaaggtggagttcgcctactacatcaactgcgactcctccaacggccggttctacctggcctggcacgacaagggctccaaggagcagcagttccggatctccacccagaacctggtgctgatccagaagtaccaggtgaacgagctgggcaaggagatccggccctgccggctgaagaagcggccccccgtgcgg

SEQ ID NO: 258 - DNA, 3243 bp, synthetic construct; identical to SEQ ID NO: 257
  misc_feature 1..3243: note = Synthetic
  source 1..3243: mol_type = other DNA

SEQ ID NO: 259 - RNA, 3249 nt, synthetic construct
  modified_base 2: mod_base = OTHER; note = thymine
  modified_base 6: mod_base = OTHER; note = thymine
  modified_base 9..12: mod_base = OTHER; note = thymine
  modified_base 18: mod_base = OTHER; note = thymine
  modified_base 21: mod_base = OTHER; note = thymine
  modified_base 24: mod_base = OTHER; note = thymine
  modified_base 26..27: mod_base = OTHER; note = thymine
  modified_base 30..31: mod_base = OTHER; note = thymine
  modified_base 33: mod_base = OTHER; note = thymine
  modified_base 35..36: mod_base = OTHER; note = thymine
  modified_base 38..39: mod_base = OTHER; note = thymine
  modified_base 42: mod_base = OTHER; note = thymine
  modified_base 44..45: mod_base = OTHER; note = thymine
  modified_base 48: mod_base = OTHER; note = thymine
  modified_base 50..51: mod_base = OTHER; note = thymine
  modified_base 54: mod_base = OTHER; note = thymine
  modified_base 56..57: mod_base = OTHER; note = thymine
  modified_base 60..61: mod_base = OTHER; note = thymine
  modified_base 63: mod_base = OTHER; note = thymine
  modified_base 65..66: mod_base = OTHER; note = thymine
  modified_base 69..70: mod_base = OTHER; note = thymine
  modified_base 75: mod_base = OTHER; note = thymine
  modified_base 77: mod_base = OTHER; note = thymine
  modified_base 80..81: mod_base = OTHER; note = thymine
  modified_base 86..87: mod_base = OTHER; note = thymine
  modified_base 90: mod_base = OTHER; note = thymine
  modified_base 102: mod_base = OTHER; note = thymine
  modified_base 105: mod_base = OTHER; note = thymine
  modified_base 107..108: mod_base = OTHER; note = thymine
  modified_base 111: mod_base = OTHER; note = thymine
  modified_base 113..114: mod_base = OTHER; note = thymine
  modified_base 116..117: mod_base = OTHER; note = thymine
  modified_base 120: mod_base = OTHER; note = thymine
  modified_base 122..123: mod_base = OTHER; note = thymine
  modified_base 126: mod_base = OTHER; note = thymine
  modified_base 128..129: mod_base = OTHER; note = thymine
  modified_base 132: mod_base = OTHER; note = thymine
  modified_base 134..138: mod_base = OTHER; note = thymine
  modified_base 144: mod_base = OTHER; note = thymine
  modified_base 147: mod_base = OTHER; note = thymine
  modified_base 152..153: mod_base = OTHER; note = thymine
  modified_base 156: mod_base = OTHER; note = thymine
  modified_base 162: mod_base = OTHER; note = thymine
  modified_base 165: mod_base = OTHER; note = thymine
  modified_base 168..169: mod_base = OTHER; note = thymine
  modified_base 171: mod_base = OTHER; note = thymine
  modified_base 173..174: mod_base = OTHER; note = thymine
  modified_base 177: mod_base = OTHER; note = thymine
  modified_base 179: mod_base = OTHER; note = thymine
  modified_base 183: mod_base = OTHER; note = thymine
  modified_base 186: mod_base = OTHER; note = thymine
  modified_base 189: mod_base = OTHER; note = thymine
  modified_base 191..192: mod_base = OTHER; note = thymine
  modified_base 195: mod_base = OTHER; note = thymine
  modified_base 198..199: mod_base = OTHER; note = thymine
  modified_base 201: mod_base = OTHER; note = thymine
  modified_base 203..204: mod_base = OTHER; note = thymine
  modified_base 207: mod_base = OTHER; note = thymine
  modified_base 210: mod_base = OTHER; note = thymine
  modified_base 212..213: mod_base = OTHER; note = thymine
  modified_base 216: mod_base = OTHER; note = thymine
  modified_base 219: mod_base = OTHER; note = thymine
  modified_base 222: mod_base = OTHER; note = thymine
  modified_base 225: mod_base = OTHER; note = thymine
  modified_base 228: mod_base = OTHER; note = thymine
  modified_base 231: mod_base = OTHER; note = thymine
  modified_base 234: mod_base = OTHER; note = thymine
  modified_base 236..237: mod_base = OTHER; note = thymine
  modified_base 239..240: mod_base = OTHER; note = thymine
  modified_base 243: mod_base = OTHER; note = thymine
  modified_base 246: mod_base = OTHER; note = thymine
  modified_base 249: mod_base = OTHER; note = thymine
  modified_base 252: mod_base = OTHER; note = thymine
  modified_base 254..255: mod_base = OTHER; note = thymine
  modified_base 257..258: mod_base = OTHER; note = thymine
  modified_base 264: mod_base = OTHER; note = thymine
  modified_base 270: mod_base = OTHER; note = thymine
  modified_base 272..273: mod_base = OTHER; note = thymine
  modified_base 275..276: mod_base = OTHER; note = thymine
  modified_base 282: mod_base = OTHER; note = thymine
  modified_base 285: mod_base = OTHER; note = thymine
  modified_base 288..291: mod_base = OTHER; note = thymine
  modified_base 294: mod_base = OTHER; note = thymine
  modified_base 300: mod_base = OTHER; note = thymine
  modified_base 303: mod_base = OTHER; note = thymine
  modified_base 305..306: mod_base = OTHER; note = thymine
  modified_base 308..309: mod_base = OTHER; note = thymine
  modified_base 313: mod_base = OTHER; note = thymine
  modified_base 315: mod_base = OTHER; note = thymine
  modified_base 317..318: mod_base = OTHER; note = thymine
  modified_base 321: mod_base = OTHER; note = thymine
  modified_base 324: mod_base = OTHER; note = thymine
  modified_base 327: mod_base = OTHER; note = thymine
  modified_base 330..331: mod_base = OTHER; note = thymine
  modified_base 338..339: mod_base = OTHER; note = thymine
  modified_base 342: mod_base = OTHER; note = thymine
  modified_base 345: mod_base = OTHER; note = thymine
  modified_base 348: mod_base = OTHER; note = thymine
  modified_base 351: mod_base = OTHER; note = thymine
  modified_base 353..354: mod_base = OTHER; note = thymine
  modified_base 357: mod_base = OTHER; note = thymine
  modified_base 360: mod_base = OTHER; note = thymine
  modified_base 365..366: mod_base = OTHER; note = thymine
  modified_base 369: mod_base = OTHER; note = thymine
  modified_base 372: mod_base = OTHER; note = thymine
  modified_base 374..375: mod_base = OTHER; note = thymine
  modified_base 379: mod_base = OTHER; note = thymine
  modified_base 382: mod_base = OTHER; note = thymine
  modified_base 384: mod_base = OTHER; note = thymine
  modified_base 387: mod_base = OTHER; note = thymine
  modified_base 389..390: mod_base = OTHER; note = thymine
  modified_base 392..393: mod_base = OTHER; note = thymine
  modified_base 395..396: mod_base = OTHER; note = thymine
  modified_base 399: mod_base = OTHER; note = thymine
  modified_base 401..402: mod_base = OTHER; note = thymine
  modified_base 404..405: mod_base = OTHER; note = thymine
  modified_base 411: mod_base = OTHER; note = thymine
  modified_base 414: mod_base = OTHER; note = thymine
  modified_base 417..418: mod_base = OTHER; note = thymine
  modified_base 420: mod_base = OTHER; note = thymine
  modified_base 422..424: mod_base = OTHER; note = thymine
  modified_base 426: mod_base = OTHER; note = thymine
  modified_base 432: mod_base = OTHER; note = thymine
  modified_base 438: mod_base = OTHER; note = thymine
  modified_base 444: mod_base = OTHER; note = thymine
  modified_base 450: mod_base = OTHER; note = thymine
  modified_base 453: mod_base = OTHER; note = thymine
  modified_base 456: mod_base = OTHER; note = thymine
  modified_base 464..465: mod_base = OTHER; note = thymine
  modified_base 468: mod_base = OTHER; note = thymine
  modified_base 471: mod_base = OTHER; note = thymine
  modified_base 473..474: mod_base = OTHER; note = thymine
  modified_base 476..477: mod_base = OTHER; note = thymine
  modified_base 483: mod_base = OTHER; note = thymine
  modified_base 485..486: mod_base = OTHER; note = thymine
  modified_base 489: mod_base = OTHER; note = thymine
  modified_base 492: mod_base = OTHER; note = thymine
  modified_base 495: mod_base = OTHER; note = thymine
  modified_base 498: mod_base = OTHER; note = thymine
  modified_base 501: mod_base = OTHER; note = thymine
  modified_base 504: mod_base = OTHER; note = thymine
  modified_base 506..507: mod_base = OTHER; note = thymine
  modified_base 513: mod_base = OTHER; note = thymine
  modified_base 516: mod_base = OTHER; note = thymine
  modified_base 519..522: mod_base = OTHER; note = thymine
  modified_base 525: mod_base = OTHER; note = thymine
  modified_base 528: mod_base = OTHER; note = thymine
  modified_base 531: mod_base = OTHER; note = thymine
  modified_base 534: mod_base = OTHER; note = thymine
  modified_base 539..540: mod_base = OTHER; note = thymine
  modified_base 543: mod_base = OTHER; note = thymine
  modified_base 545..546: mod_base = OTHER; note = thymine
  modified_base 549: mod_base = OTHER; note = thymine
  modified_base 553..555: mod_base = OTHER; note = thymine
  modified_base 565: mod_base = OTHER; note = thymine
  modified_base 567: mod_base = OTHER; note = thymine
  modified_base 570: mod_base = OTHER; note = thymine
  modified_base 573: mod_base = OTHER; note = thymine
  modified_base 575..576: mod_base = OTHER; note = thymine
  modified_base 579: mod_base = OTHER; note = thymine
  modified_base 582: mod_base = OTHER; note = thymine
  modified_base 588: mod_base = OTHER; note = thymine
  modified_base 591: mod_base = OTHER; note = thymine
  modified_base 594..595: mod_base = OTHER; note = thymine
  modified_base 597..598: mod_base = OTHER; note = thymine
  modified_base 600: mod_base = OTHER; note = thymine
  modified_base 603: mod_base = OTHER; note = thymine
  modified_base 606..610: mod_base = OTHER; note = thymine
  modified_base 612: mod_base = OTHER; note = thymine
  modified_base 615: mod_base = OTHER; note = thymine
  modified_base 621: mod_base = OTHER; note = thymine
  modified_base 623..624: mod_base = OTHER; note = thymine
  modified_base 630: mod_base = OTHER; note = thymine
  modified_base 635..636: mod_base = OTHER; note = thymine
  modified_base 638..639: mod_base = OTHER; note = thymine
  modified_base 641..642: mod_base = OTHER; note = thymine
  modified_base 644..648: mod_base = OTHER; note = thymine
  modified_base 664..666: mod_base = OTHER; note = thymine
  modified_base 669: mod_base = OTHER; note = thymine
  modified_base 672: mod_base = OTHER; note = thymine
  modified_base 675: mod_base = OTHER; note = thymine
  modified_base 678: mod_base = OTHER; note = thymine
  modified_base 680..682: mod_base = OTHER; note = thymine
  modified_base 684: mod_base = OTHER; note = thymine
  modified_base 687: mod_base = OTHER; note = thymine
  modified_base 690: mod_base = OTHER; note = thymine
  modified_base 692..693: mod_base = OTHER; note = thymine
  modified_base 702: mod_base = OTHER; note = thymine
  modified_base 704..705: mod_base = OTHER; note = thymine
  modified_base 711: mod_base = OTHER; note = thymine
  modified_base 713..714: mod_base = OTHER; note = thymine
  modified_base 716..717: mod_base = OTHER; note = thymine
  modified_base 719: mod_base = OTHER; note = thymine
  modified_base 723: mod_base = OTHER; note = thymine
  modified_base 729: mod_base = OTHER; note = thymine
  modified_base 732: mod_base = OTHER; note = thymine
  modified_base 735: mod_base = OTHER; note = thymine
  modified_base 737..739: mod_base = OTHER; note = thymine
  modified_base 741: mod_base = OTHER; note = thymine
  modified_base 744: mod_base = OTHER; note = thymine
  modified_base 747: mod_base = OTHER; note = thymine
  modified_base 750: mod_base = OTHER; note = thymine
  modified_base 752..753: mod_base = OTHER; note = thymine
  modified_base 761: mod_base = OTHER; note = thymine
  modified_base 764..765: mod_base = OTHER; note = thymine
  modified_base 768: mod_base = OTHER; note = thymine
  modified_base 771..772: mod_base = OTHER; note = thymine
  modified_base 774: mod_base = OTHER; note = thymine
  modified_base 777..780: mod_base = OTHER; note = thymine
  modified_base 786: mod_base = OTHER; note = thymine
  modified_base 789: mod_base = OTHER; note = thymine
  modified_base 795: mod_base = OTHER; note = thymine
  modified_base 801: mod_base = OTHER; note = thymine
  modified_base 804: mod_base = OTHER; note = thymine
  modified_base 810: mod_base = OTHER; note = thymine
  modified_base 813..814: mod_base = OTHER; note = thymine
  modified_base 816: mod_base = OTHER; note = thymine
  modified_base 819: mod_base = OTHER; note = thymine
  modified_base 822: mod_base = OTHER; note = thymine
  modified_base 828..831: mod_base = OTHER; note = thymine
  modified_base 833..835: mod_base = OTHER; note = thymine
  modified_base 839..840: mod_base = OTHER; note = thymine
  modified_base 843: mod_base = OTHER; note = thymine
  modified_base 848..849: mod_base = OTHER; note = thymine
  modified_base 852: mod_base = OTHER; note = thymine
  modified_base 855: mod_base = OTHER; note = thymine
  modified_base 857..858: mod_base = OTHER; note = thymine
  modified_base 861: mod_base = OTHER; note = thymine
  modified_base 863..864: mod_base = OTHER; note = thymine
  modified_base 866..867: mod_base = OTHER; note = thymine
  modified_base 876..877: mod_base = OTHER; note = thymine
  modified_base 879: mod_base = OTHER; note = thymine
  modified_base 885: mod_base = OTHER; note = thymine
  modified_base 888: mod_base = OTHER; note = thymine
  modified_base 890..891: mod_base = OTHER; note = thymine
  modified_base 894: mod_base = OTHER; note = thymine
  modified_base 897: mod_base = OTHER; note = thymine
  modified_base 900: mod_base = OTHER; note = thymine
  modified_base 906: mod_base = OTHER; note = thymine
  modified_base 909: mod_base = OTHER; note = thymine
  modified_base 912: mod_base = OTHER; note = thymine
  modified_base 914..915: mod_base = OTHER; note = thymine
  modified_base 917: mod_base = OTHER; note = thymine
  modified_base 921: mod_base = OTHER; note = thymine
  modified_base 927..928: mod_base = OTHER; note = thymine
  modified_base 930: mod_base = OTHER; note = thymine
  modified_base 933: mod_base = OTHER; note = thymine
  modified_base 937: mod_base = OTHER; note = thymine
  modified_base 939: mod_base = OTHER; note = thymine
  modified_base 944..945: mod_base = OTHER; note = thymine
  modified_base 948..949: mod_base = OTHER; note = thymine
  modified_base 951: mod_base = OTHER; note = thymine
  modified_base 954: mod_base = OTHER; note = thymine
  modified_base 960: mod_base = OTHER; note = thymine
  modified_base 963: mod_base = OTHER; note = thymine
  modified_base 968..969: mod_base = OTHER; note = thymine
  modified_base 971..972: mod_base = OTHER; note = thymine
  modified_base 975: mod_base = OTHER; note = thymine
  modified_base 977..978: mod_base = OTHER; note = thymine
  modified_base 984: mod_base = OTHER; note = thymine
  modified_base 987: mod_base = OTHER; note = thymine
  modified_base 990..996: mod_base = OTHER; note = thymine
  modified_base 1002: mod_base = OTHER; note = thymine
  modified_base 1004..1005: mod_base = OTHER; note = thymine
  modified_base 1008..1009: mod_base = OTHER; note = thymine
  modified_base 1011: mod_base = OTHER; note = thymine
  modified_base 1014: mod_base = OTHER; note = thymine
  modified_base 1020: mod_base = OTHER; note = thymine
  modified_base 1023: mod_base = OTHER; note = thymine
  modified_base 1026: mod_base = OTHER; note = thymine
  modified_base 1032..1033: mod_base = OTHER; note = thymine
  modified_base 1035: mod_base = OTHER; note = thymine
  modified_base 1038: mod_base = OTHER; note = thymine
  modified_base 1040..1041: mod_base = OTHER; note = thymine
  modified_base 1043: mod_base = OTHER; note = thymine
  modified_base 1049: mod_base = OTHER; note = thymine
  modified_base 1056..1057: mod_base = OTHER; note = thymine
  modified_base 1059: mod_base = OTHER; note = thymine
  modified_base 1062: mod_base = OTHER; note = thymine
  modified_base 1065: mod_base = OTHER; note = thymine
  modified_base 1067..1069: mod_base = OTHER; note = thymine
  modified_base 1071: mod_base = OTHER; note = thymine
  modified_base 1074: mod_base = OTHER; note = thymine
  modified_base 1077: mod_base = OTHER; note = thymine
  modified_base 1079..1080: mod_base = OTHER; note = thymine
  modified_base 1092: mod_base = OTHER; note = thymine
  modified_base 1094..1095: mod_base = OTHER; note = thymine
  modified_base 1101: mod_base = OTHER; note = thymine
  modified_base 1108: mod_base = OTHER; note = thymine
  modified_base 1110: mod_base = OTHER; note = thymine
  modified_base 1113: mod_base = OTHER; note = thymine
  modified_base 1115..1116: mod_base = OTHER; note = thymine
  modified_base 1119: mod_base = OTHER; note = thymine
  modified_base 1121..1123: mod_base = OTHER; note = thymine
  modified_base 1125..1126: mod_base = OTHER; note = thymine
  modified_base 1128: mod_base = OTHER; note = thymine
  modified_base 1133..1134: mod_base = OTHER; note = thymine
  modified_base 1140: mod_base = OTHER; note = thymine
  modified_base 1145..1146: mod_base = OTHER; note = thymine
  modified_base 1149: mod_base = OTHER; note = thymine
  modified_base 1152: mod_base = OTHER; note = thymine
  modified_base 1155..1159: mod_base = OTHER; note = thymine
  modified_base 1161: mod_base = OTHER; note = thymine
  modified_base 1163..1167: mod_base = OTHER; note = thymine
  modified_base 1173: mod_base = OTHER; note = thymine
  modified_base 1176: mod_base = OTHER; note = thymine
  modified_base 1182: mod_base = OTHER; note = thymine
  modified_base 1184..1185: mod_base = OTHER; note = thymine
  modified_base 1188: mod_base = OTHER; note = thymine
  modified_base 1191: mod_base = OTHER; note = thymine
  modified_base 1194: mod_base = OTHER; note = thymine
  modified_base 1196..1197: mod_base = OTHER; note = thymine
  modified_base 1203: mod_base = OTHER; note = thymine
  modified_base 1206: mod_base = OTHER; note = thymine
  modified_base 1208..1209: mod_base = OTHER; note = thymine
  modified_base 1215: mod_base = OTHER; note = thymine
  modified_base 1220..1221: mod_base = OTHER; note = thymine
  modified_base 1223..1224: mod_base = OTHER; note = thymine
  modified_base 1230: mod_base = OTHER; note = thymine
  modified_base 1232..1233: mod_base = OTHER; note = thymine
  modified_base 1235..1236: mod_base = OTHER; note = thymine
  modified_base 1242: mod_base = OTHER; note = thymine
  modified_base 1244..1246: mod_base = OTHER; note = thymine
  modified_base 1248..1251: mod_base = OTHER; note = thymine
  modified_base 1254: mod_base = OTHER; note = thymine
  modified_base 1258..1260: mod_base = OTHER; note = thymine
  modified_base 1262..1263: mod_base = OTHER; note = thymine
  modified_base 1268..1270: mod_base = OTHER; note = thymine
  modified_base 1272: mod_base = OTHER; note = thymine
  modified_base 1274..1275: mod_base = OTHER; note = thymine
  modified_base 1281: mod_base = OTHER; note = thymine
  modified_base 1283..1284: mod_base = OTHER; note = thymine
  modified_base 1287: mod_base = OTHER; note = thymine
  modified_base 1290: mod_base = OTHER; note = thymine
  modified_base 1292..1293: mod_base = OTHER; note = thymine
  modified_base 1295..1296: mod_base = OTHER; note = thymine
  modified_base 1299: mod_base = OTHER; note = thymine
  modified_base 1301..1302: mod_base = OTHER; note = thymine
  modified_base 1304: mod_base = OTHER; note = thymine
  modified_base 1314: mod_base = OTHER; note = thymine
  modified_base 1320..1321: mod_base = OTHER; note = thymine
  modified_base 1323: mod_base = OTHER; note = thymine
  modified_base 1326: mod_base = OTHER; note = thymine
  modified_base 1332..1333: mod_base = OTHER; note = thymine
  modified_base 1335: mod_base = OTHER; note = thymine
  modified_base 1338: mod_base = OTHER; note = thymine
  modified_base 1343..1345: mod_base = OTHER; note = thymine
  modified_base 1347: mod_base = OTHER; note = thymine
  modified_base 1350: mod_base = OTHER; note = thymine
  modified_base 1353: mod_base = OTHER; note = thymine
  modified_base 1356..1357: mod_base = OTHER; note = thymine
  modified_base 1359: mod_base = OTHER; note = thymine
  modified_base 1362: mod_base = OTHER; note = thymine
  modified_base 1371: mod_base = OTHER; note = thymine
  modified_base 1374: mod_base = OTHER; note = thymine
  modified_base 1385..1387: mod_base = OTHER; note = thymine
  modified_base 1389: mod_base = OTHER; note = thymine
  modified_base 1391..1392: mod_base = OTHER; note = thymine
  modified_base 1395: mod_base = OTHER; note = thymine
  modified_base 1398: mod_base = OTHER; note = thymine
  modified_base 1400..1401: mod_base = OTHER; note = thymine
  modified_base 1404: mod_base = OTHER; note = thymine
  modified_base 1407: mod_base = OTHER; note = thymine
  modified_base 1410: mod_base = OTHER; note = thymine
  modified_base 1415..1416: mod_base = OTHER; note = thymine
  modified_base 1419: mod_base = OTHER; note = thymine
  modified_base 1422: mod_base = OTHER; note = thymine
  modified_base 1425: mod_base = OTHER; note = thymine
  modified_base 1427..1428: mod_base = OTHER; note = thymine
  modified_base 1430..1431: mod_base = OTHER; note = thymine
  modified_base 1433..1434: mod_base = OTHER; note = thymine
  modified_base 1437: mod_base = OTHER; note = thymine
  modified_base 1440: mod_base = OTHER; note = thymine
  modified_base 1442..1444: mod_base = OTHER; note = thymine
  modified_base 1446: mod_base = OTHER; note = thymine
  modified_base 1452: mod_base = OTHER; note = thymine
  modified_base 1455: mod_base = OTHER; note = thymine
  modified_base 1460..1461: mod_base = OTHER; note = thymine
  modified_base 1463..1464: mod_base = OTHER; note = thymine
  modified_base 1467: mod_base = OTHER; note = thymine
  modified_base 1470: mod_base = OTHER; note = thymine
  modified_base 1472..1473: mod_base = OTHER; note = thymine
  modified_base 1475..1476: mod_base = OTHER; note = thymine
  modified_base 1479: mod_base = OTHER; note = thymine
  modified_base 1482..1483: mod_base = OTHER; note = thymine
  modified_base 1485: mod_base = OTHER; note = thymine
  modified_base 1488..1489: mod_base = OTHER; note = thymine
  modified_base 1491: mod_base = OTHER; note = thymine
  modified_base 1494: mod_base = OTHER; note = thymine
  modified_base 1497: mod_base = OTHER; note = thymine
  modified_base 1500: mod_base = OTHER; note = thymine
  modified_base 1502..1503: mod_base = OTHER; note = thymine
  modified_base 1506: mod_base = OTHER; note = thymine
  modified_base 1508..1509: mod_base = OTHER; note = thymine
  modified_base 1515: mod_base = OTHER; note = thymine
  modified_base 1518: mod_base = OTHER; note = thymine
  modified_base 1521: mod_base = OTHER; note = thymine
  modified_base 1526..1527: mod_base = OTHER; note = thymine
  modified_base 1530: mod_base = OTHER; note = thymine
  modified_base 1534: mod_base = OTHER; note = thymine
  modified_base 1536..1539: mod_base = OTHER; note = thymine
  modified_base 1545: mod_base = OTHER; note = thymine
  modified_base 1548: mod_base = OTHER; note = thymine
  modified_base 1556..1557: mod_base = OTHER; note = thymine
  modified_base 1566: mod_base = OTHER; note = thymine
  modified_base 1578: mod_base = OTHER; note = thymine
  modified_base 1581: mod_base = OTHER; note = thymine
  modified_base 1587: mod_base = OTHER; note = thymine
  modified_base 1590: mod_base = OTHER; note = thymine
  modified_base 1599: mod_base = OTHER; note = thymine
  modified_base 1602: mod_base = OTHER; note = thymine
  modified_base 1605: mod_base = OTHER; note = thymine
  modified_base 1609..1611: mod_base = OTHER; note = thymine
  modified_base 1614: mod_base = OTHER; note = thymine
  modified_base 1618: mod_base = OTHER; note = thymine
  modified_base 1620..1623: mod_base = OTHER; note = thymine
  modified_base 1626: mod_base = OTHER; note = thymine
  modified_base 1629..1632: mod_base = OTHER; note = thymine
  modified_base 1634..1635: mod_base = OTHER; note = thymine
  modified_base 1638: mod_base = OTHER; note = thymine
  modified_base 1644: mod_base = OTHER; note = thymine
  modified_base 1648: mod_base = OTHER; note = thymine
  modified_base 1650: mod_base = OTHER; note = thymine
  modified_base 1656: mod_base = OTHER; note = thymine
  modified_base 1658..1659: mod_base = OTHER; note = thymine
  modified_base 1661..1662: mod_base = OTHER; note = thymine
  modified_base 1667..1668: mod_base = OTHER; note = thymine
  modified_base 1671: mod_base = OTHER; note = thymine
  modified_base 1673..1675: mod_base = OTHER; note = thymine
  modified_base 1677: mod_base = OTHER; note = thymine
  modified_base 1689: mod_base = OTHER; note = thymine
  modified_base 1692: mod_base = OTHER; note = thymine
  modified_base 1696: mod_base = OTHER; note = thymine
  modified_base 1698: mod_base = OTHER; note = thymine
  modified_base 1700..1702: mod_base = OTHER; note = thymine
  modified_base 1704..1705: mod_base = OTHER; note = thymine
  modified_base 1707: mod_base = OTHER; note = thymine
  modified_base 1710: mod_base = OTHER; note = thymine
  modified_base 1718..1719: mod_base = OTHER; note = thymine
  modified_base 1722: mod_base = OTHER; note = thymine
  modified_base 1724..1725: mod_base = OTHER; note = thymine
  modified_base 1727..1728: mod_base = OTHER; note = thymine
  modified_base 1731: mod_base = OTHER; note = thymine
  modified_base 1733..1734: mod_base = OTHER; note = thymine
  modified_base 1737: mod_base = OTHER; note = thymine
  modified_base 1746..1747: mod_base = OTHER; note = thymine
  modified_base 1749: mod_base = OTHER; note = thymine
  modified_base 1751..1752: mod_base = OTHER; note = thymine
  modified_base 1757..1758: mod_base = OTHER; note = thymine
  modified_base 1761: mod_base = OTHER; note = thymine
  modified_base 1764: mod_base = OTHER; note = thymine
  modified_base 1767: mod_base = OTHER; note = thymine
  modified_base 1769..1770: mod_base = OTHER; note = thymine
  modified_base 1773..1777: mod_base = OTHER; note = thymine
  modified_base 1779: mod_base = OTHER; note = thymine
  modified_base 1782: mod_base = OTHER; note = thymine
  modified_base 1785..1786: mod_base = OTHER; note = thymine
  modified_base 1791: mod_base = OTHER; note = thymine
  modified_base 1794..1795: mod_base = OTHER; note = thymine
  modified_base 1797..1800: mod_base = OTHER; note = thymine
  modified_base 1803: mod_base = OTHER; note = thymine
  modified_base 1806: mod_base = OTHER; note = thymine
  modified_base 1811..1812: mod_base = OTHER; note = thymine
  modified_base 1814..1815: mod_base = OTHER; note = thymine
  modified_base 1817..1818: mod_base = OTHER; note = thymine
  modified_base 1820..1821: mod_base = OTHER; note = thymine
  modified_base 1824..1825: mod_base = OTHER; note = thymine
  modified_base 1827: mod_base = OTHER; note = thymine
  modified_base 1833: mod_base = OTHER; note = thymine
  modified_base 1839: mod_base = OTHER; note = thymine
  modified_base 1845: mod_base = OTHER; note = thymine
  modified_base 1848: mod_base = OTHER; note = thymine
  modified_base 1854: mod_base = OTHER; note = thymine
  modified_base 1857..1858: mod_base = OTHER; note = thymine
  modified_base 1860: mod_base = OTHER; note = thymine
  modified_base 1864: mod_base = OTHER; note = thymine
  modified_base 1866..1869: mod_base = OTHER; note = thymine
  modified_base 1872: mod_base = OTHER; note = thymine
  modified_base 1875: mod_base = OTHER; note = thymine
  modified_base 1881: mod_base = OTHER; note = thymine
  modified_base 1884..1885: mod_base = OTHER; note = thymine
  modified_base 1887: mod_base = OTHER; note = thymine
  modified_base 1890: mod_base = OTHER; note = thymine
  modified_base 1894: mod_base = OTHER; note = thymine
  modified_base 1903..1905: mod_base = OTHER; note = thymine
  modified_base 1911: mod_base = OTHER; note = thymine
  modified_base 1914: mod_base = OTHER; note = thymine
  modified_base 1916..1917: mod_base = OTHER; note = thymine
  modified_base 1923..1924: mod_base = OTHER; note = thymine
  modified_base 1926: mod_base = OTHER; note = thymine
  modified_base 1929..1932: mod_base = OTHER; note = thymine
  modified_base 1935: mod_base = OTHER; note = thymine
  modified_base 1938..1939: mod_base = OTHER; note = thymine
  modified_base 1941: mod_base = OTHER; note = thymine
  modified_base 1953: mod_base = OTHER; note = thymine
  modified_base 1955..1956: mod_base = OTHER; note = thymine
  modified_base 1958..1959: mod_base = OTHER; note = thymine
  modified_base 1961..1962: mod_base = OTHER; note = thymine
  modified_base 1969..1971: mod_base = OTHER; note = thymine
  modified_base 1974: mod_base = OTHER; note = thymine
  modified_base 1980: mod_base = OTHER; note = thymine
  modified_base 1983..1986: mod_base = OTHER; note = thymine
  modified_base 1993: mod_base = OTHER; note = thymine
  modified_base 1995: mod_base = OTHER; note = thymine
  modified_base 1998: mod_base = OTHER; note = thymine
  modified_base 2000..2001: mod_base = OTHER; note = thymine
  modified_base 2004: mod_base = OTHER; note = thymine
  modified_base 2007: mod_base = OTHER; note = thymine
  modified_base 2010: mod_base = OTHER; note = thymine
  modified_base 2013..2014: mod_base = OTHER; note = thymine
  modified_base 2016: mod_base = OTHER; note = thymine
  modified_base 2018..2019: mod_base = OTHER; note = thymine
  modified_base 2022: mod_base = OTHER; note = thymine
  modified_base 2025..2028: mod_base = OTHER; note = thymine
  modified_base 2030..2032: mod_base = OTHER; note = thymine
  modified_base 2034: mod_base = OTHER; note = thymine
  modified_base 2038..2040: mod_base = OTHER; note = thymine
  modified_base 2042..2043: mod_base = OTHER; note = thymine
  modified_base 2046: mod_base = OTHER; note = thymine
  modified_base 2049: mod_base = OTHER; note = thymine
  modified_base 2052: mod_base = OTHER; note = thymine
  modified_base 2054..2055: mod_base = OTHER; note = thymine
  modified_base 2057..2058: mod_base = OTHER; note = thymine
  modified_base 2060..2061: mod_base = OTHER; note = thymine
  modified_base 2064: mod_base = OTHER; note = thymine
  modified_base 2067: mod_base = OTHER; note = thymine
  modified_base 2073: mod_base = OTHER; note = thymine
  modified_base 2079: mod_base = OTHER; note = thymine
  modified_base 2082: mod_base = OTHER; note = thymine
  modified_base 2084..2088: mod_base = OTHER; note = thymine
  modified_base 2091..2092: mod_base = OTHER; note = thymine
  modified_base 2094: mod_base = OTHER; note = thymine
  modified_base 2097: mod_base = OTHER; note = thymine
  modified_base 2100: mod_base = OTHER; note = thymine
  modified_base 2105..2106: mod_base = OTHER; note = thymine
  modified_base 2109: mod_base = OTHER; note = thymine
  modified_base 2112: mod_base = OTHER; note = thymine
  modified_base 2114..2115: mod_base = OTHER; note = thymine
  modified_base 2117..2118: mod_base = OTHER; note = thymine
  modified_base 2121: mod_base = OTHER; note = thymine
  modified_base 2124..2128: mod_base = OTHER; note = thymine
  modified_base 2133: mod_base = OTHER; note = thymine
  modified_base 2135..2136: mod_base = OTHER; note = thymine
  modified_base 2139: mod_base = OTHER; note = thymine
  modified_base 2144..2145: mod_base = OTHER; note = thymine
  modified_base 2148: mod_base = OTHER; note = thymine
  modified_base 2151: mod_base = OTHER; note = thymine
  modified_base 2157: mod_base = OTHER; note = thymine
  modified_base 2160: mod_base = OTHER; note = thymine
  modified_base 2163: mod_base = OTHER; note = thymine
  modified_base 2166: mod_base = OTHER; note = thymine
  modified_base 2169: mod_base = OTHER; note = thymine
  modified_base 2172: mod_base = OTHER; note = thymine
  modified_base 2174..2175: mod_base = OTHER; note = thymine
  modified_base 2178: mod_base = OTHER; note = thymine
  modified_base 2181: mod_base = OTHER; note = thymine
  modified_base 2183..2184: mod_base = OTHER; note = thymine
  modified_base 2186..2187: mod_base = OTHER; note = thymine
  modified_base 2189..2190: mod_base = OTHER; note = thymine
  modified_base 2193..2194: mod_base = OTHER; note = thymine
  modified_base 2196..2197: mod_base = OTHER; note = thymine
  modified_base 2199: mod_base = OTHER; note = thymine
  modified_base 2202: mod_base = OTHER; note = thymine
  modified_base 2204..2205: mod_base = OTHER; note = thymine
  modified_base 2208: mod_base = OTHER; note = thymine
  modified_base 2210: mod_base = OTHER; note = thymine
  modified_base 2222..2223: mod_base = OTHER; note = thymine
  modified_base 2226: mod_base = OTHER; note = thymine
  modified_base 2229..2232: mod_base = OTHER; note = thymine
  modified_base 2234..2235: mod_base = OTHER; note = thymine
  modified_base 2238..2239: mod_base = OTHER; note = thymine
  modified_base 2241: mod_base = OTHER; note = thymine
  modified_base 2249: mod_base = OTHER; note = thymine
  modified_base 2253: mod_base = OTHER; note = thymine
  modified_base 2256..2259: mod_base = OTHER; note = thymine
  modified_base 2262: mod_base = OTHER; note = thymine
  modified_base 2265: mod_base = OTHER; note = thymine
  modified_base 2271: mod_base = OTHER; note = thymine
  modified_base 2273..2274: mod_base = OTHER; note = thymine
  modified_base 2277: mod_base = OTHER; note = thymine
  modified_base 2286: mod_base = OTHER; note = thymine
  modified_base 2289: mod_base = OTHER; note = thymine
  modified_base 2294..2295: mod_base = OTHER; note = thymine
  modified_base 2297..2298: mod_base = OTHER; note = thymine
  modified_base 2301: mod_base = OTHER; note = thymine
  modified_base 2310: mod_base = OTHER; note = thymine
  modified_base 2313..2316: mod_base = OTHER; note = thymine
  modified_base 2319: mod_base = OTHER; note = thymine
  modified_base 2325..2326: mod_base = OTHER; note = thymine
  modified_base 2332..2337: mod_base = OTHER; note = thymine
  modified_base 2340: mod_base = OTHER; note = thymine
  modified_base 2348..2349: mod_base = OTHER; note = thymine
  modified_base 2351: mod_base = OTHER; note = thymine
  modified_base 2354..2355: mod_base = OTHER; note = thymine
  modified_base 2358: mod_base = OTHER; note = thymine
  modified_base 2360..2364: mod_base = OTHER; note = thymine
  modified_base 2367: mod_base = OTHER; note = thymine
  modified_base 2373: mod_base = OTHER; note = thymine
  modified_base 2376: mod_base = OTHER; note = thymine
  modified_base 2379: mod_base = OTHER; note = thymine
  modified_base 2385: mod_base = OTHER; note = thymine
  modified_base 2389..2391: mod_base = OTHER; note = thymine
  modified_base 2400: mod_base = OTHER; note = thymine
  modified_base 2403: mod_base = OTHER; note = thymine
  modified_base 2406: mod_base = OTHER; note = thymine
  modified_base 2409: mod_base = OTHER; note = thymine
  modified_base 2417..2418: mod_base = OTHER; note = thymine
  modified_base 2421: mod_base = OTHER; note = thymine
  modified_base 2424: mod_base = OTHER; note = thymine
  modified_base 2426..2427: mod_base = OTHER; note = thymine
  modified_base 2429..2430: mod_base = OTHER; note = thymine
  modified_base 2433: mod_base = OTHER; note = thymine
  modified_base 2441..2443: mod_base = OTHER; note = thymine
  modified_base 2445..2446: mod_base = OTHER; note = thymine
  modified_base 2448: mod_base = OTHER; note = thymine
  modified_base 2451: mod_base = OTHER; note = thymine
  modified_base 2454: mod_base = OTHER; note = thymine
  modified_base 2460: mod_base = OTHER; note = thymine
  modified_base 2462..2463: mod_base = OTHER; note = thymine
  modified_base 2466: mod_base = OTHER; note = thymine
  modified_base 2470: mod_base = OTHER; note = thymine
  modified_base 2472: mod_base = OTHER; note = thymine
  modified_base 2474..2475: mod_base = OTHER; note = thymine
  modified_base 2478: mod_base = OTHER; note = thymine
  modified_base 2481: mod_base = OTHER; note = thymine
  modified_base 2483..2487: mod_base = OTHER; note = thymine
  modified_base 2489..2491: mod_base = OTHER; note = thymine
  modified_base 2493: mod_base = OTHER; note = thymine
  modified_base 2496: mod_base = OTHER; note = thymine
  modified_base 2499: mod_base = OTHER; note = thymine
  modified_base 2502: mod_base = OTHER; note = thymine
  modified_base 2505: mod_base = OTHER; note = thymine
  modified_base 2508: mod_base = OTHER; note = thymine
  modified_base 2513: mod_base = OTHER; note = thymine
  modified_base 2515: mod_base = OTHER; note = thymine
  modified_base 2517: mod_base = OTHER; note = thymine
  modified_base 2520: mod_base = OTHER; note = thymine
  modified_base 2523: mod_base = OTHER; note = thymine
  modified_base 2526: mod_base = OTHER; note = thymine
  modified_base 2532: mod_base = OTHER; note = thymine
  modified_base 2535: mod_base = OTHER; note = thymine
  modified_base 2537..2538: mod_base = OTHER; note = thymine
  modified_base 2541..2542: mod_base = OTHER; note = thymine
  modified_base 2544: mod_base = OTHER; note = thymine
  modified_base 2547: mod_base = OTHER; note = thymine
  modified_base 2553..2556: mod_base = OTHER; note = thymine
  modified_base 2558..2559: mod_base = OTHER; note = thymine
  modified_base 2565: mod_base = OTHER; note = thymine
  modified_base 2568: mod_base = OTHER; note = thymine
  modified_base 2576..2578: mod_base = OTHER; note = thymine
  modified_base 2580: mod_base = OTHER; note = thymine
  modified_base 2582..2583: mod_base = OTHER; note = thymine
  modified_base 2589: mod_base = OTHER; note = thymine
  modified_base 2591..2593: mod_base = OTHER; note = thymine
  modified_base 2597..2598: mod_base = OTHER; note = thymine
  modified_base 2601: mod_base = OTHER; note = thymine
  modified_base 2606..2607: mod_base = OTHER; note = thymine
  modified_base 2612..2613: mod_base = OTHER; note = thymine
  modified_base 2616: mod_base = OTHER; note = thymine
  modified_base 2619: mod_base = OTHER; note = thymine
  modified_base 2621..2622: mod_base = OTHER; note = thymine
  modified_base 2628: mod_base = OTHER; note = thymine
  modified_base 2630: mod_base = OTHER; note = thymine
  modified_base 2633..2634: mod_base = OTHER; note = thymine
  modified_base 2637..2638: mod_base = OTHER; note = thymine
  modified_base 2640: mod_base = OTHER; note = thymine
  modified_base 2646: mod_base = OTHER; note = thymine
  modified_base 2649: mod_base = OTHER; note = thymine
  modified_base 2652: mod_base = OTHER; note = thymine
  modified_base 2657..2658: mod_base = OTHER; note = thymine
  modified_base 2663..2665: mod_base = OTHER; note = thymine
  modified_base 2667: mod_base = OTHER; note = thymine
  modified_base 2673: mod_base = OTHER; note = thymine
  modified_base 2675..2676: mod_base = OTHER; note = thymine
  modified_base 2682: mod_base = OTHER; note = thymine
  modified_base 2685: mod_base = OTHER; note = thymine
  modified_base 2687..2688: mod_base = OTHER; note = thymine
  modified_base 2694..2695: mod_base = OTHER; note = thymine
  modified_base 2697: mod_base = OTHER; note = thymine
  modified_base 2700: mod_base = OTHER; note = thymine
  modified_base 2703: mod_base = OTHER; note = thymine
  modified_base 2706: mod_base = OTHER; note = thymine
  modified_base 2709: mod_base = OTHER; note = thymine
  modified_base 2718..2721: mod_base = OTHER; note = thymine
  modified_base 2724: mod_base = OTHER; note = thymine
  modified_base 2727: mod_base = OTHER; note = thymine
  modified_base 2733: mod_base = OTHER; note = thymine
  modified_base 2736: mod_base = OTHER; note = thymine
  modified_base 2739..2743: mod_base = OTHER; note = thymine
  modified_base 2745: mod_base = OTHER; note = thymine
  modified_base 2754: mod_base = OTHER; note = thymine
  modified_base 2757: mod_base = OTHER; note = thymine
  modified_base 2762..2763: mod_base = OTHER; note = thymine
  modified_base 2765..2766: mod_base = OTHER; note = thymine
  modified_base 2772: mod_base = OTHER; note = thymine
  modified_base 2774..2775: mod_base = OTHER; note = thymine
  modified_base 2778: mod_base = OTHER; note = thymine
  modified_base 2780..2781: mod_base = OTHER; note = thymine
  modified_base 2790: mod_base = OTHER; note = thymine
  modified_base 2797: mod_base = OTHER; note = thymine
  modified_base 2799: mod_base = OTHER; note = thymine
  modified_base 2802: mod_base = OTHER; note = thymine
  modified_base 2804..2805: mod_base = OTHER; note = thymine
  modified_base 2807..2808: mod_base = OTHER; note = thymine
  modified_base 2810..2811: mod_base = OTHER; note = thymine
  modified_base 2814: mod_base = OTHER; note = thymine
  modified_base 2823: mod_base = OTHER; note = thymine
  modified_base 2826..2827: mod_base = OTHER; note = thymine
  modified_base 2829: mod_base = OTHER; note = thymine
  modified_base 2832: mod_base = OTHER; note = thymine
  modified_base 2834..2835: mod_base = OTHER; note = thymine
  modified_base 2838: mod_base = OTHER; note = thymine
  modified_base 2841: mod_base = OTHER; note = thymine
  modified_base 2844: mod_base = OTHER; note = thymine
  modified_base 2847: mod_base = OTHER; note = thymine
  modified_base 2850: mod_base = OTHER; note = thymine
  modified_base 2852: mod_base = OTHER; note = thymine
  modified_base 2855..2856: mod_base = OTHER; note = thymine
  modified_base 2859: mod_base = OTHER; note = thymine
  modified_base 2861..2862: mod_base = OTHER; note = thymine
  modified_base 2865: mod_base = OTHER; note = thymine
  modified_base 2867..2872: mod_base = OTHER; note = thymine
  modified_base 2874: mod_base = OTHER; note = thymine
  modified_base 2879..2880: mod_base = OTHER; note = thymine
  modified_base 2883: mod_base = OTHER; note = thymine
  modified_base 2892: mod_base = OTHER; note = thymine
  modified_base 2898: mod_base = OTHER; note = thymine
  modified_base 2902: mod_base = OTHER; note = thymine
  modified_base 2904..2907: mod_base = OTHER; note = thymine
  modified_base 2909..2910: mod_base = OTHER; note = thymine
  modified_base 2912..2913: mod_base = OTHER; note = thymine
  modified_base 2916: mod_base = OTHER; note = thymine
  modified_base 2918..2920: mod_base = OTHER; note = thymine
  modified_base 2922: mod_base = OTHER; note = thymine
  modified_base 2925..2926: mod_base = OTHER; note = thymine
  modified_base 2933..2934: mod_base = OTHER; note = thymine
  modified_base 2937: mod_base = OTHER; note = thymine
  modified_base 2943: mod_base = OTHER; note = thymine
  modified_base 2945..2946: mod_base = OTHER; note = thymine
  modified_base 2948..2949: mod_base = OTHER; note = thymine
  modified_base 2952: mod_base = OTHER; note = thymine
  modified_base 2955: mod_base = OTHER; note = thymine
  modified_base 2957..2958: mod_base = OTHER; note = thymine
  modified_base 2961..2962: mod_base = OTHER; note = thymine
  modified_base 2964: mod_base = OTHER; note = thymine
  modified_base 2970..2971: mod_base = OTHER; note = thymine
  modified_base 2973: mod_base = OTHER; note = thymine
  modified_base 2976: mod_base = OTHER; note = thymine
  modified_base 2978..2979: mod_base = OTHER; note = thymine
  modified_base 2982: mod_base = OTHER; note = thymine
  modified_base 2985..2986: mod_base = OTHER; note = thymine
  modified_base 2988..2989: mod_base = OTHER; note = thymine
  modified_base 2991: mod_base = OTHER; note = thymine
  modified_base 2994..2998: mod_base = OTHER; note = thymine
  modified_base 3000..3004: mod_base = OTHER; note = thymine
  modified_base 3006: mod_base = OTHER; note = thymine
  modified_base 3008..3009: mod_base = OTHER; note = thymine
  modified_base 3012: mod_base = OTHER; note = thymine
  modified_base 3016: mod_base = OTHER; note = thymine
  modified_base 3018: mod_base = OTHER; note = thymine
  modified_base 3021: mod_base = OTHER; note = thymine
  modified_base 3023..3024: mod_base = OTHER; note = thymine
  modified_base 3026..3027: mod_base = OTHER; note = thymine
  modified_base 3030..3033: mod_base = OTHER; note = thymine
  modified_base 3042: mod_base = OTHER; note = thymine
  modified_base 3049: mod_base = OTHER; note = thymine
  modified_base 3051: mod_base = OTHER; note = thymine
  modified_base 3056..3057: mod_base = OTHER; note = thymine
  modified_base 3061..3063: mod_base = OTHER; note = thymine
  modified_base 3066..3067: mod_base = OTHER; note = thymine
  modified_base 3069..3070: mod_base = OTHER; note = thymine
  modified_base 3072: mod_base = OTHER; note = thymine
  modified_base 3074..3075: mod_base = OTHER; note = thymine
  modified_base 3078..3079: mod_base = OTHER; note = thymine
  modified_base 3081: mod_base = OTHER; note = thymine
  modified_base 3084..3085: mod_base = OTHER; note = thymine
  modified_base 3087..3088: mod_base = OTHER; note = thymine
  modified_base 3090: mod_base = OTHER; note = thymine
  modified_base 3093: mod_base = OTHER; note = thymine
  modified_base 3096: mod_base = OTHER; note = thymine
  modified_base 3099..3103: mod_base = OTHER; note = thymine
  modified_base 3105: mod_base = OTHER; note = thymine
  modified_base 3107..3108: mod_base = OTHER; note = thymine
  modified_base 3111..3112: mod_base = OTHER; note = thymine
  modified_base 3117: mod_base = OTHER; note = thymine
  modified_base 3120: mod_base = OTHER; note = thymine
  modified_base 3126..3127: mod_base = OTHER; note = thymine
  modified_base 3129: mod_base = OTHER; note = thymine
  modified_base 3142..3144: mod_base = OTHER; note = thymine
  modified_base 3147: mod_base = OTHER; note = thymine
  modified_base 3149..3151: mod_base = OTHER; note = thymine
  modified_base 3153: mod_base = OTHER; note = thymine
  modified_base 3156: mod_base = OTHER; note = thymine
  modified_base 3162: mod_base = OTHER; note = thymine
  modified_base 3164..3165: mod_base = OTHER; note = thymine
  modified_base 3167..3168: mod_base = OTHER; note = thymine
  modified_base 3170..3171: mod_base = OTHER; note = thymine
  modified_base 3173..3174: mod_base = OTHER; note = thymine
  modified_base 3181: mod_base = OTHER; note = thymine
  modified_base 3183: mod_base = OTHER; note = thymine
  modified_base 3188..3189: mod_base = OTHER; note = thymine
  modified_base 3192: mod_base = OTHER; note = thymine
  modified_base 3197..3198: mod_base = OTHER; note = thymine
  modified_base 3201: mod_base = OTHER; note = thymine
  modified_base 3209..3210: mod_base = OTHER; note = thymine
  modified_base 3213: mod_base = OTHER; note = thymine
  modified_base 3216..3217: mod_base = OTHER; note = thymine
  modified_base 3219: mod_base = OTHER; note = thymine
  modified_base 3222: mod_base = OTHER; note = thymine
  modified_base 3224..3225: mod_base = OTHER; note = thymine
  modified_base 3234: mod_base = OTHER; note = thymine
  modified_base 3237: mod_base = OTHER; note = thymine
  modified_base 3240: mod_base = OTHER; note = thymine
  modified_base 3242..3243: mod_base = OTHER; note = thymine
  modified_base 3246: mod_base = OTHER; note = thymine
  misc_feature 1..3249: note = Synthetic
  source 1..3249: mol_type = other RNA
atggctgcttttaagcctaatcctattaattatattcttggtcttgctattggtattgcttctgttggttgggctatggttgagattgatgaggaggagaatcctattcgtcttattgatcttggtgttcgtgtttttgagcgtgctgaggttcctaagactggtgattctcttgctatggctcgtcgtcttgctcgttctgttcgtcgtcttactcgtcgtcgtgctcatcgtcttcttcgtgctcgtcgtcttcttaagcgtgagggtgttcttcaggctgctgattttgatgagaatggtcttattaagtctcttcctaatactccttggcagcttcgtgctgctgctcttgatcgtaagcttactcctcttgagtggtctgctgttcttcttcatcttattaagcatcgtggttatctttctcagcgtaagaatgagggtgagactgctgataaggagcttggtgctcttcttaagggtgttgctaataatgctcatgctcttcagactggtgattttcgtactcctgctgagcttgctcttaataagtttgagaaggagtctggtcatattcgtaatcagcgtggtgattattctcatactttttctcgtaaggatcttcaggctgagcttattcttctttttgagaagcagaaggagtttggtaatcctcatgtttctggtggtcttaaggagggtattgagactcttcttatgactcagcgtcctgctctttctggtgatgctgttcagaagatgcttggtcattgtacttttgagcctgctgagcctaaggctgctaagaatacttatactgctgagcgttttatttggcttactaagcttaataatcttcgtattcttgagcagggttctgagcgtcctcttactgatactgagcgtgctactcttatggatgagccttatcgtaagtctaagcttacttatgctcaggctcgtaagcttcttggtcttgaggatactgctttttttaagggtcttcgttatggtaaggataatgctgaggcttctactcttatggagatgaaggcttatcatgctatttctcgtgctcttgagaaggagggtcttaaggataagaagtctcctcttaatctttcttctgagcttcaggatgagattggtactgctttttctctttttaagactgatgaggatattactggtcgtcttaaggatcgtgttcagcctgagattcttgaggctcttcttaagcatatttcttttgataagtttgttcagatttctcttaaggctcttcgtcgtattgttcctcttatggagcagggtaagcgttatgatgaggcttgtgctgagatttatggtgatcattatggtaagaagaatactgaggagaagatttatcttcctcctattcctgctgatgagattcgtaatcctgttgttcttcgtgctctttctcaggctcgtaaggttattaatggtgttgttcgtcgttatggttctcctgctcgtattcatattgagactgctcgtgaggttggtaagtcttttaaggatcgtaaggagattgagaagcgtcaggaggagaatcgtaaggatcgtgagaaggctgctgctaagtttcgtgagtattttcctaattttgttggtgagcctaagtctaaggatattcttaagcttcgtctttatgagcagcagcatggtaagtgtctttattctggtaaggagattaatcttgttcgtcttaatgagaagggttatgttgagattgatgctgctcttcctttttctcgtacttgggatgattcttttaataataaggttcttgttcttggttctgagaatcagaataagggtaatcagactccttatgagtattttaatggtaaggataattctcgtgagtggcaggagtttaaggctcgtgttgagacttctcgttttcctcgttctaagaagcagcgtattcttcttcagaagtttgatgaggatggttttaaggagtgtaatcttaatgatactcgttatgttaatcgttttctttgtcagtttgttgctgatcatattcttcttactggtaagggtaagcgtcgtgtttttgcttctaatggtcagattactaatcttcttcgtggtttttggggtcttcgtaaggttcgtgctgagaatgatcgtcatcatgctcttgatgctgttgttgttgcttgttctactgttgctatgcagcagaagattactcgttttgttcgttataaggagatgaatgcttttgatggtaagactattgataaggagactggtaaggttcttcatcagaagactcattttcctcagccttgggagttttttgctcaggaggttatgattcgtgtttttggtaagcctgatggtaagcctgagtttgaggaggctgatactcctgagaagcttcgtactcttcttgctgagaagctttcttctcgtcctgaggctgttcatgagtatgttactcctctttttgtttctcgtgctcctaatcgtaagatgtctggtgctcataaggatactcttcgttctgctaagcgttttgttaagcataatgagaagatttctgttaagcgtgtttggcttactgagattaagcttgctgatcttgagaatatggttaattataagaatggtcgtgagattgagctttatgaggctcttaaggctcgtcttgaggcttatggtggtaatgctaagcaggcttttgatcctaaggataatcctttttataagaagggtggtcagcttgttaaggctgttcgtgttgagaagactcaggagtctggtgttcttcttaataagaagaatgcttatactattgctgataatggtgatatggttcgtgttgatgttttttgtaaggttgataagaagggtaagaatcagtattttattgttcctatttatgcttggcaggttgctgagaatattcttcctgatattgattgtaagggttatcgtattgatgattcttatactttttgtttttctcttcataagtatgatcttattgcttttcagaaggatgagaagtctaaggttgagtttgcttattatattaattgtgattcttctaatggtcgtttttatcttgcttggcatgataagggttctaaggagcagcagtttcgtatttctactcagaatcttgttcttattcagaagtatcaggttaatgagcttggtaaggagattcgtccttgtcgtcttaagaagcgtcctcctgttcgttga

SEQ ID NO: 260 - RNA, 3249 nt, synthetic construct
  modified_base 2: mod_base = OTHER; note = thymine
  modified_base 10..11: mod_base = OTHER; note = thymine
  modified_base 26: mod_base = OTHER; note = thymine
  modified_base 31: mod_base = OTHER; note = thymine
  modified_base 35: mod_base = OTHER; note = thymine
  modified_base 38: mod_base = OTHER; note = thymine
  modified_base 44: mod_base = OTHER; note = thymine
  modified_base 50: mod_base = OTHER; note = thymine
  modified_base 56: mod_base = OTHER; note = thymine
  modified_base 61: mod_base = OTHER; note = thymine
  modified_base 65: mod_base = OTHER; note = thymine
  modified_base 70: mod_base = OTHER; note = thymine
  modified_base 77: mod_base = OTHER; note = thymine
  modified_base 80: mod_base = OTHER; note = thymine
  modified_base 86: mod_base = OTHER; note = thymine
  modified_base 107: mod_base = OTHER; note = thymine
  modified_base 113: mod_base = OTHER; note = thymine
  modified_base 116: mod_base = OTHER; note = thymine
  modified_base 122: mod_base = OTHER; note = thymine
  modified_base 128: mod_base = OTHER; note = thymine
  modified_base 134: mod_base = OTHER; note = thymine
  modified_base 136..137: mod_base = OTHER; note = thymine
  modified_base 152: mod_base = OTHER; note = thymine
  modified_base 169: mod_base = OTHER; note = thymine
  modified_base 173: mod_base = OTHER; note = thymine
  modified_base 179: mod_base = OTHER; note = thymine
  modified_base 191: mod_base = OTHER; note = thymine
  modified_base 199: mod_base = OTHER; note = thymine
  modified_base 203: mod_base = OTHER; note = thymine
  modified_base 212: mod_base = OTHER; note = thymine
  modified_base 236: mod_base = OTHER; note = thymine
  modified_base 239: mod_base = OTHER; note = thymine
  modified_base 254: mod_base = OTHER; note = thymine
  modified_base 257: mod_base = OTHER; note = thymine
  modified_base 272: mod_base = OTHER; note = thymine
  modified_base 275: mod_base = OTHER; note = thymine
  modified_base 289..290: mod_base = OTHER; note = thymine
  modified_base 305: mod_base = OTHER; note = thymine
  modified_base 308: mod_base = OTHER; note = thymine
  modified_base 313: mod_base = OTHER; note = thymine
  modified_base 317: mod_base = OTHER; note = thymine
  modified_base 331: mod_base = OTHER; note = thymine
  modified_base 338: mod_base = OTHER; note = thymine
  modified_base 353: mod_base = OTHER; note = thymine
  modified_base 365: mod_base = OTHER; note = thymine
  modified_base 374: mod_base = OTHER; note = thymine
  modified_base 379: mod_base = OTHER; note = thymine
  modified_base 382: mod_base = OTHER; note = thymine
  modified_base 389: mod_base = OTHER; note = thymine
  modified_base 392: mod_base = OTHER; note = thymine
  modified_base 395: mod_base = OTHER; note = thymine
  modified_base 401: mod_base = OTHER; note = thymine
  modified_base 404: mod_base = OTHER; note = thymine
  modified_base 418: mod_base = OTHER; note = thymine
  modified_base 422: mod_base = OTHER; note = thymine
  modified_base 424: mod_base = OTHER; note = thymine
  modified_base 464: mod_base = OTHER; note = thymine
  modified_base 473: mod_base = OTHER; note = thymine
  modified_base 476: mod_base = OTHER; note = thymine
  modified_base 485: mod_base = OTHER; note = thymine
  modified_base 506: mod_base = OTHER; note = thymine
  modified_base 520..521: mod_base = OTHER; note = thymine
  modified_base 539: mod_base = OTHER; note = thymine
  modified_base 545: mod_base = OTHER; note = thymine
  modified_base 553..554: mod_base = OTHER; note = thymine
  modified_base 565: mod_base = OTHER; note = thymine
  modified_base 575: mod_base = OTHER; note = thymine
  modified_base 595: mod_base = OTHER; note = thymine
  modified_base 598: mod_base = OTHER; note = thymine
  modified_base 607..608: mod_base = OTHER; note = thymine
  modified_base 610: mod_base = OTHER; note = thymine
  modified_base 623: mod_base = OTHER; note = thymine
  modified_base 635: mod_base = OTHER; note = thymine
  modified_base 638: mod_base = OTHER; note = thymine
  modified_base 641: mod_base = OTHER; note = thymine
  modified_base 644: mod_base = OTHER; note = thymine
  modified_base 646..647: mod_base = OTHER; note = thymine
  modified_base 664..665: mod_base = OTHER; note = thymine
  modified_base 680: mod_base = OTHER; note = thymine
  modified_base 682: mod_base = OTHER; note = thymine
  modified_base 692: mod_base = OTHER; note = thymine
  modified_base 704: mod_base = OTHER; note = thymine
  modified_base 713: mod_base = OTHER; note = thymine
  modified_base 716: mod_base = OTHER; note = thymine
  modified_base 719: mod_base = OTHER; note = thymine
  modified_base 737: mod_base = OTHER; note = thymine
  modified_base 739: mod_base = OTHER; note = thymine
  modified_base 752: mod_base = OTHER; note = thymine
  modified_base 761: mod_base = OTHER; note = thymine
  modified_base 764: mod_base = OTHER; note = thymine
  modified_base 772: mod_base = OTHER; note = thymine
  modified_base 778..779: mod_base = OTHER; note = thymine
  modified_base 814: mod_base = OTHER; note = thymine
  modified_base 829..830: mod_base = OTHER; note = thymine
  modified_base 833: mod_base = OTHER; note = thymine
  modified_base 835: mod_base = OTHER; note = thymine
  modified_base 839: mod_base = OTHER; note = thymine
  modified_base 848: mod_base = OTHER; note = thymine
  modified_base 857: mod_base = OTHER; note = thymine
  modified_base 863: mod_base = OTHER; note = thymine
  modified_base 866: mod_base = OTHER; note = thymine
  modified_base 877: mod_base = OTHER; note = thymine
  modified_base 890: mod_base = OTHER; note = thymine
  modified_base 914: mod_base = OTHER; note = thymine
  modified_base 917: mod_base = OTHER; note = thymine
  modified_base 928: mod_base = OTHER; note = thymine
  modified_base 937: mod_base = OTHER; note = thymine
  modified_base 944: mod_base = OTHER; note = thymine
  modified_base 949: mod_base = OTHER; note = thymine
  modified_base 968: mod_base = OTHER; note = thymine
  modified_base 971: mod_base = OTHER; note = thymine
  modified_base 977: mod_base = OTHER; note = thymine
  modified_base 991..992: mod_base = OTHER; note = thymine
  modified_base 994..995: mod_base = OTHER; note = thymine
  modified_base 1004: mod_base = OTHER; note = thymine
  modified_base 1009: mod_base = OTHER; note = thymine
  modified_base 1033: mod_base = OTHER; note = thymine
  modified_base 1040: mod_base = OTHER; note = thymine
  modified_base 1043: mod_base = OTHER; note = thymine
  modified_base 1049: mod_base = OTHER; note = thymine
  modified_base 1057: mod_base = OTHER; note = thymine
  modified_base 1067: mod_base = OTHER; note = thymine
  modified_base 1069: mod_base = OTHER; note = thymine
  modified_base 1079: mod_base = OTHER; note = thymine
  modified_base 1094: mod_base = OTHER; note = thymine
  modified_base 1108: mod_base = OTHER; note = thymine
  modified_base 1115: mod_base = OTHER; note = thymine
  modified_base 1121: mod_base = OTHER; note = thymine
  modified_base 1123: mod_base = OTHER; note = thymine
  modified_base 1126: mod_base = OTHER; note = thymine
  modified_base 1133: mod_base = OTHER; note = thymine
  modified_base 1145: mod_base = OTHER; note = thymine
  modified_base 1156..1157: mod_base = OTHER; note = thymine
  modified_base 1159: mod_base = OTHER; note = thymine
  modified_base 1163: mod_base = OTHER; note = thymine
  modified_base 1165..1166: mod_base = OTHER; note = thymine
  modified_base 1184: mod_base = OTHER; note = thymine
  modified_base 1196: mod_base = OTHER; note = thymine
  modified_base 1208: mod_base = OTHER; note = thymine
  modified_base 1220: mod_base = OTHER; note = thymine
  modified_base 1223: mod_base = OTHER; note = thymine
  modified_base 1232: mod_base = OTHER; note = thymine
  modified_base 1235: mod_base = OTHER; note = thymine
  modified_base 1244: mod_base = OTHER; note = thymine
  modified_base 1246: mod_base = OTHER; note = thymine
  modified_base 1249..1250: mod_base = OTHER; note = thymine
  modified_base 1258..1259: mod_base = OTHER; note = thymine
  modified_base 1262: mod_base = OTHER; note = thymine
  modified_base 1268: mod_base = OTHER; note = thymine
  modified_base 1270: mod_base = OTHER; note = thymine
  modified_base 1274: mod_base = OTHER; note = thymine
  modified_base 1283: mod_base = OTHER; note = thymine
  modified_base 1292: mod_base = OTHER; note = thymine
  modified_base 1295: mod_base = OTHER; note = thymine
  modified_base 1301: mod_base = OTHER; note = thymine
  modified_base 1304: mod_base = OTHER; note = thymine
  modified_base 1321: mod_base = OTHER; note = thymine
  modified_base 1333: mod_base = OTHER; note = thymine
  modified_base 1343: mod_base = OTHER; note = thymine
  modified_base 1345: mod_base = OTHER; note = thymine
  modified_base 1357: mod_base = OTHER; note = thymine
  modified_base 1385: mod_base = OTHER; note = thymine
  modified_base 1387: mod_base = OTHER; note = thymine
  modified_base 1391: mod_base = OTHER; note = thymine
  modified_base 1400: mod_base = OTHER; note = thymine
  modified_base 1415: mod_base = OTHER; note = thymine
  modified_base 1427: mod_base = OTHER; note = thymine
  modified_base 1430: mod_base = OTHER; note = thymine
  modified_base 1433: mod_base = OTHER; note = thymine
  modified_base 1442: mod_base = OTHER; note = thymine
  modified_base 1444: mod_base = OTHER; note = thymine
  modified_base 1460: mod_base = OTHER; note = thymine
  modified_base 1463: mod_base = OTHER; note = thymine
  modified_base 1472: mod_base = OTHER; note = thymine
  modified_base 1475: mod_base = OTHER; note = thymine
  modified_base 1483: mod_base = OTHER; note = thymine
  modified_base 1489: mod_base = OTHER; note = thymine
  modified_base 1502: mod_base = OTHER; note = thymine
  modified_base 1508: mod_base = OTHER; note = thymine
  modified_base 1526: mod_base = OTHER; note = thymine
  modified_base 1534: mod_base = OTHER; note = thymine
  modified_base 1537..1538: mod_base = OTHER; note = thymine
  modified_base 1556: mod_base = OTHER; note = thymine
  modified_base 1609..1610: mod_base = OTHER; note = thymine
  modified_base 1618: mod_base = OTHER; note = thymine
  modified_base 1621..1622: mod_base = OTHER; note = thymine
  modified_base 1630..1631: mod_base = OTHER; note = thymine
  modified_base 1634: mod_base = OTHER; note = thymine
  modified_base 1648: mod_base = OTHER; note = thymine
  modified_base 1658: mod_base = OTHER; note = thymine
  modified_base 1661: mod_base = OTHER; note = thymine
  modified_base 1667: mod_base = OTHER; note = thymine
  modified_base 1673: mod_base = OTHER; note = thymine
  modified_base 1675: mod_base = OTHER; note = thymine
  modified_base 1696: mod_base = OTHER; note = thymine
  modified_base 1700: mod_base = OTHER; note = thymine
  modified_base 1702: mod_base = OTHER; note = thymine
  modified_base 1705: mod_base = OTHER; note = thymine
  modified_base 1718: mod_base = OTHER; note = thymine
  modified_base 1724: mod_base = OTHER; note = thymine
  modified_base 1727: mod_base = OTHER; note = thymine
  modified_base 1733: mod_base = OTHER; note = thymine
  modified_base 1747: mod_base = OTHER; note = thymine
  modified_base 1751: mod_base = OTHER; note = thymine
  modified_base 1757: mod_base = OTHER; note = thymine
  modified_base 1769: mod_base = OTHER; note = thymine
  modified_base 1774..1775: mod_base = OTHER; note = thymine
  modified_base 1777: mod_base = OTHER; note = thymine
  modified_base 1786: mod_base = OTHER; note = thymine
  modified_base 1795: mod_base = OTHER; note = thymine
  modified_base 1798..1799: mod_base = OTHER; note = thymine
  modified_base 1811: mod_base = OTHER; note = thymine
  modified_base 1814: mod_base = OTHER; note = thymine
  modified_base 1817: mod_base = OTHER; note = thymine
  modified_base 1820: mod_base = OTHER; note = thymine
  modified_base 1825: mod_base = OTHER; note = thymine
  modified_base 1858: mod_base = OTHER; note = thymine
  modified_base 1864: mod_base = OTHER; note = thymine
  modified_base 1867..1868: mod_base = OTHER; note = thymine
  modified_base 1885: mod_base = OTHER; note = thymine
  modified_base 1894: mod_base = OTHER; note = thymine
  modified_base 1903..1904: mod_base = OTHER; note = thymine
  modified_base 1916: mod_base = OTHER; note = thymine
  modified_base 1924: mod_base = OTHER; note = thymine
  modified_base 1930..1931: mod_base = OTHER; note = thymine
  modified_base 1939: mod_base = OTHER; note = thymine
  modified_base 1955: mod_base = OTHER; note = thymine
  modified_base 1958: mod_base = OTHER; note = thymine
  modified_base 1961: mod_base = OTHER; note = thymine
  modified_base 1969..1970: mod_base = OTHER; note = thymine
  modified_base 1984..1985: mod_base = OTHER; note = thymine
  modified_base 1993: mod_base = OTHER; note = thymine
  modified_base 2000: mod_base = OTHER; note = thymine
  modified_base 2014: mod_base = OTHER; note = thymine
  modified_base 2018: mod_base = OTHER; note = thymine
  modified_base 2026..2027: mod_base = OTHER; note = thymine
  modified_base 2030: mod_base = OTHER; note = thymine
  modified_base 2032: mod_base = OTHER; note = thymine
  modified_base 2038..2039: mod_base = OTHER; note = thymine
  modified_base 2042: mod_base = OTHER; note = thymine
  modified_base 2054: mod_base = OTHER; note = thymine
  modified_base 2057: mod_base = OTHER; note = thymine
  modified_base 2060: mod_base = OTHER; note = thymine
  modified_base 2084: mod_base = OTHER; note = thymine
  modified_base 2086..2087: mod_base = OTHER; note = thymine
  modified_base 2092: mod_base = OTHER; note = thymine
  modified_base 2105: mod_base = OTHER; note = thymine
  modified_base 2114: mod_base = OTHER; note = thymine
  modified_base 2117: mod_base = OTHER; note = thymine
  modified_base 2125..2126: mod_base = OTHER; note = thymine
  modified_base 2128: mod_base = OTHER; note = thymine
  modified_base 2135: mod_base = OTHER; note = thymine
  modified_base 2144: mod_base = OTHER; note = thymine
  modified_base 2174: mod_base = OTHER; note = thymine
  modified_base 2183: mod_base = OTHER; note = thymine
  modified_base 2186: mod_base = OTHER; note = thymine
  modified_base 2189: mod_base = OTHER; note = thymine
  modified_base 2194: mod_base = OTHER; note = thymine
  modified_base 2197: mod_base = OTHER; note = thymine
  modified_base 2204: mod_base = OTHER; note = thymine
  modified_base 2210: mod_base = OTHER; note = thymine
  modified_base 2222: mod_base = OTHER; note = thymine
  modified_base 2230..2231: mod_base = OTHER; note = thymine
  modified_base 2234: mod_base = OTHER; note = thymine
  modified_base 2239: mod_base = OTHER; note = thymine
  modified_base 2249: mod_base = OTHER; note = thymine
  modified_base 2257..2258: mod_base = OTHER; note = thymine
  modified_base 2273: mod_base = OTHER; note = thymine
  modified_base 2294: mod_base = OTHER; note = thymine
  modified_base 2297: mod_base = OTHER; note = thymine
  modified_base 2314..2315: mod_base = OTHER; note = thymine
  modified_base 2326: mod_base = OTHER; note = thymine
  modified_base 2332..2333: mod_base = OTHER; note = thymine
  modified_base 2335..2336: mod_base = OTHER; note = thymine
  modified_base 2348: mod_base = OTHER; note = thymine
  modified_base 2351: mod_base = OTHER; note = thymine
  modified_base 2354: mod_base = OTHER; note = thymine
  modified_base 2360: mod_base = OTHER; note = thymine
  modified_base 2362..2363: mod_base = OTHER; note = thymine
  modified_base 2389..2390: mod_base = OTHER; note = thymine
  modified_base 2417: mod_base = OTHER; note = thymine
  modified_base 2426: mod_base = OTHER; note = thymine
  modified_base 2429: mod_base = OTHER; note = thymine
  modified_base 2441: mod_base = OTHER; note = thymine
  modified_base 2443: mod_base = OTHER; note = thymine
  modified_base 2446: mod_base = OTHER; note = thymine
  modified_base 2462: mod_base = OTHER; note = thymine
  modified_base 2470: mod_base = OTHER; note = thymine
  modified_base 2474: mod_base = OTHER; note = thymine
  modified_base 2483: mod_base = OTHER; note = thymine
  modified_base 2485..2486: mod_base = OTHER; note = thymine
  modified_base 2489: mod_base = OTHER; note = thymine
  modified_base 2491: mod_base = OTHER; note = thymine
  modified_base 2513: mod_base = OTHER; note = thymine
  modified_base 2515: mod_base = OTHER; note = thymine
  modified_base 2537: mod_base = OTHER; note = thymine
  modified_base 2542: mod_base = OTHER; note = thymine
  modified_base 2554..2555: mod_base = OTHER; note = thymine
  modified_base 2558: mod_base = OTHER; note = thymine
  modified_base 2576: mod_base = OTHER; note = thymine
  modified_base 2578: mod_base = OTHER; note = thymine
  modified_base 2582: mod_base = OTHER; note = thymine
  modified_base 2591: mod_base = OTHER; note = thymine
  modified_base 2593: mod_base = OTHER; note = thymine
  modified_base 2597: mod_base = OTHER; note = thymine
  modified_base 2606: mod_base = OTHER; note = thymine
  modified_base 2612: mod_base = OTHER; note = thymine
  modified_base 2621: mod_base = OTHER; note = thymine
  modified_base 2630: mod_base = OTHER; note = thymine
  modified_base 2633: mod_base = OTHER; note = thymine
  modified_base 2638: mod_base = OTHER; note = thymine
  modified_base 2657: mod_base = OTHER; note = thymine
  modified_base 2663: mod_base = OTHER; note = thymine
  modified_base 2665: mod_base = OTHER; note = thymine
  modified_base 2675: mod_base = OTHER; note = thymine
  modified_base 2687: mod_base = OTHER; note = thymine
  modified_base 2695: mod_base = OTHER; note = thymine
  modified_base 2719..2720: mod_base = OTHER; note = thymine
  modified_base 2740..2741: mod_base = OTHER; note = thymine
  modified_base 2743: mod_base = OTHER; note = thymine
  modified_base 2762: mod_base = OTHER; note = thymine
  modified_base 2765: mod_base = OTHER; note = thymine
  modified_base 2774: mod_base = OTHER; note = thymine
  modified_base 2780: mod_base = OTHER; note = thymine
  modified_base 2797: mod_base = OTHER; note = thymine
  modified_base 2804: mod_base = OTHER; note = thymine
  modified_base 2807: mod_base = OTHER; note = thymine
  modified_base 2810: mod_base = OTHER; note = thymine
  modified_base 2827: mod_base = OTHER; note = thymine
  modified_base 2834: mod_base = OTHER; note = thymine
  modified_base 2852: mod_base = OTHER; note = thymine
  modified_base 2855: mod_base = OTHER; note = thymine
  modified_base 2861: mod_base = OTHER; note = thymine
  modified_base 2867: mod_base = OTHER; note = thymine
  modified_base 2869..2870: mod_base = OTHER; note = thymine
  modified_base 2872: mod_base = OTHER; note = thymine
  modified_base 2879: mod_base = OTHER; note = thymine
  modified_base 2902: mod_base = OTHER; note = thymine
  modified_base 2905..2906: mod_base = OTHER; note = thymine
  modified_base 2909: mod_base = OTHER; note = thymine
  modified_base 2912: mod_base = OTHER; note = thymine
  modified_base 2918: mod_base = OTHER; note = thymine
  modified_base 2920: mod_base = OTHER; note = thymine
  modified_base 2926: mod_base = OTHER; note = thymine
  modified_base 2933: mod_base = OTHER; note = thymine
  modified_base 2945: mod_base = OTHER; note = thymine
  modified_base 2948: mod_base = OTHER; note = thymine
  modified_base 2957: mod_base = OTHER; note = thymine
  modified_base 2962: mod_base = OTHER; note = thymine
  modified_base 2971: mod_base = OTHER; note = thymine
  modified_base 2978: mod_base = OTHER; note = thymine
  modified_base 2986: mod_base = OTHER; note = thymine
  modified_base 2989: mod_base = OTHER; note = thymine
  modified_base 2995..2996: mod_base = OTHER; note = thymine
  modified_base 2998: mod_base = OTHER; note = thymine
  modified_base 3001..3002: mod_base = OTHER; note = thymine
  modified_base 3004: mod_base = OTHER; note = thymine
  modified_base 3008: mod_base = OTHER; note = thymine
  modified_base 3016: mod_base = OTHER; note = thymine
  modified_base 3023: mod_base = OTHER; note = thymine
  modified_base 3026: mod_base = OTHER; note = thymine
  modified_base 3031..3032: mod_base = OTHER; note = thymine
  modified_base 3049: mod_base = OTHER; note = thymine
  modified_base 3056: mod_base = OTHER; note = thymine
  modified_base 3061..3062: mod_base = OTHER; note = thymine
  modified_base 3067: mod_base = OTHER; note = thymine
  modified_base 3070: mod_base = OTHER; note = thymine
  modified_base 3074: mod_base = OTHER; note = thymine
  modified_base 3079: mod_base = OTHER; note = thymine
  modified_base 3085: mod_base = OTHER; note = thymine
  modified_base 3088: mod_base = OTHER; note = thymine
  modified_base 3100..3101: mod_base = OTHER; note = thymine
  modified_base 3103: mod_base = OTHER; note = thymine
  modified_base 3107: mod_base = OTHER; note = thymine
  modified_base 3112: mod_base = OTHER; note = thymine
  modified_base 3127: mod_base = OTHER; note = thymine
  modified_base 3142..3143: mod_base = OTHER; note = thymine
  modified_base 3149: mod_base = OTHER; note = thymine
  modified_base 3151: mod_base = OTHER; note = thymine
  modified_base 3164: mod_base = OTHER; note = thymine
  modified_base 3167: mod_base = OTHER; note = thymine
  modified_base 3170: mod_base = OTHER; note = thymine
  modified_base 3173: mod_base = OTHER; note = thymine
  modified_base 3181: mod_base = OTHER; note = thymine
  modified_base 3188: mod_base = OTHER; note = thymine
  modified_base 3197: mod_base = OTHER; note = thymine
  modified_base 3209: mod_base = OTHER; note = thymine
  modified_base 3217: mod_base = OTHER; note = thymine
  modified_base 3224: mod_base = OTHER; note = thymine
  modified_base 3242: mod_base = OTHER; note = thymine
  misc_feature 1..3249: note = Synthetic
  source 1..3249: mol_type = other RNA
atggccgccttcaagcccaaccccatcaactacatcctgggcctggccatcggcatcgcctccgtgggctgggccatggtggagatcgacgaggaggagaaccccatccggctgatcgacctgggcgtgcgggtgttcgagcgggccgaggtgcccaagaccggcgactccctggccatggcccggcggctggcccggtccgtgcggcggctgacccggcggcgggcccaccggctgctgcgggcccggcggctgctgaagcgggagggcgtgctgcaggccgccgacttcgacgagaacggcctgatcaagtccctgcccaacaccccctggcagctgcgggccgccgccctggaccggaagctgacccccctggagtggtccgccgtgctgctgcacctgatcaagcaccggggctacctgtcccagcggaagaacgagggcgagaccgccgacaaggagctgggcgccctgctgaagggcgtggccaacaacgcccacgccctgcagaccggcgacttccggacccccgccgagctggccctgaacaagttcgagaaggagtccggccacatccggaaccagcggggcgactactcccacaccttctcccggaaggacctgcaggccgagctgatcctgctgttcgagaagcagaaggagttcggcaacccccacgtgtccggcggcctgaaggagggcatcgagaccctgctgatgacccagcggcccgccctgtccggcgacgccgtgcagaagatgctgggccactgcaccttcgagcccgccgagcccaaggccgccaagaacacctacaccgccgagcggttcatctggctgaccaagctgaacaacctgcggatcctggagcagggctccgagcggcccctgaccgacaccgagcgggccaccctgatggacgagccctaccggaagtccaagctgacctacgcccaggcccggaagctgctgggcctggaggacaccgccttcttcaagggcctgcggtacggcaaggacaacgccgaggcctccaccctgatggagatgaaggcctaccacgccatctcccgggccctggagaaggagggcctgaaggacaagaagtcccccctgaacctgtcctccgagctgcaggacgagatcggcaccgccttctccctgttcaagaccgacgaggacatcaccggccggctgaaggaccgggtgcagcccgagatcctggaggccctgctgaagcacatctccttcgacaagttcgtgcagatctccctgaaggccctgcggcggatcgtgcccctgatggagcagggcaagcggtacgacgaggcctgcgccgagatctacggcgaccactacggcaagaagaacaccgaggagaagatctacctgccccccatccccgccgacgagatccggaaccccgtggtgctgcgggccctgtcccaggcccggaaggtgatcaacggcgtggtgcggcggtacggctcccccgcccggatccacatcgagaccgcccgggaggtgggcaagtccttcaaggaccggaaggagatcgagaagcggcaggaggagaaccggaaggaccgggagaaggccgccgccaagttccgggagtacttccccaacttcgtgggcgagcccaagtccaaggacatcctgaagctgcggctgtacgagcagcagcacggcaagtgcctgtactccggcaaggagatcaacctggtgcggctgaacgagaagggctacgtggagatcgacgccgccctgcccttctcccggacctgggacgactccttcaacaacaaggtgctggtgctgggctccgagaaccagaacaagggcaaccagaccccctacgagtacttcaacggcaaggacaactcccgggagtggcaggagttcaaggcccgggtggagacctcccggttcccccggtccaagaagcagcggatcctgctgcagaagttcgacgaggacggcttcaaggagtgcaacctgaacgacacccggtacgtgaaccggttcctgtgccagttcgtggccgaccacatcctgctgaccggcaagggcaagcggcgggtgttcgcctccaacggccagatcaccaacctgctgcggggcttctggggcctgcggaaggtgcgggccgagaacgaccggcaccacgccctggacgccgtggtggtggcctgctccaccgtggccatgcagcagaagatcacccggttcgtgcggtacaaggagatgaacgccttcgacggcaagaccatcgacaaggagaccggcaaggtgctgcaccagaagacccacttcccccagccctgggagttcttcgcccaggaggtgatgatccgggtgttcggcaagcccgacggcaagcccgagttcgaggaggccgacacccccgagaagctgcggaccctgctggccgagaagctgtcctcccggcccgaggccgtgcacgagtacgtgacccccctgttcgtgtcccgggcccccaaccggaagatgtccggcgcccacaaggacaccctgcggtccgccaagcggttcgtgaagcacaacgagaagatctccgtgaagcgggtgtggctgaccgagatcaagctggccgacctggagaacatggtgaactacaagaacggccgggagatcgagctgtacgaggccctgaaggcccggctggaggcctacggcggcaacgccaagcaggccttcgaccccaaggacaaccccttctacaagaagggcggccagctggtgaaggccgtgcgggtggagaagacccaggagtccggcgtgctgctgaacaagaagaacgcctacaccatcgccgacaacggcgacatggtgcgggtggacgtgttctgcaaggtggacaagaagggcaagaaccagtacttcatcgtgcccatctacgcctggcaggtggccgagaacatcctgcccgacatcgactgcaagggctaccggatcgacgactcctacaccttctgcttctccctgcacaagtacgacctgatcgccttccagaaggacgagaagtccaaggtggagttcgcctactacatcaactgcgactcctccaacggccggttctacctggcctggcacgacaagggctccaaggagcagcagttccggatctccacccagaacctggtgctgatccagaagtaccaggtgaacgagctgggcaaggagatccggccctgccggctgaagaagcggccccccgtgcggtga

SEQ ID NO: 261 - RNA, 3249 nt, synthetic construct
  modified_base 2: mod_base = OTHER; note = thymine
  modified_base 10..11: mod_base = OTHER; note = thymine
  modified_base 26: mod_base = OTHER; note = thymine
  modified_base 31: mod_base = OTHER; note = thymine
  modified_base 35: mod_base = OTHER; note = thymine
  modified_base 38: mod_base = OTHER; note = thymine
  modified_base 44: mod_base = OTHER; note = thymine
  modified_base 50: mod_base = OTHER; note = thymine
  modified_base 56: mod_base = OTHER; note = thymine
  modified_base 61: mod_base = OTHER; note = thymine
  modified_base 65: mod_base = OTHER; note = thymine
  modified_base 70: mod_base = OTHER; note = thymine
  modified_base 77: mod_base = OTHER; note = thymine
  modified_base 80: mod_base = OTHER; note = thymine
  modified_base 86: mod_base = OTHER; note = thymine
  modified_base 107: mod_base = OTHER; note = thymine
  modified_base 113: mod_base = OTHER; note = thymine
  modified_base 116: mod_base = OTHER; note = thymine
  modified_base 122: mod_base = OTHER; note = thymine
  modified_base 128: mod_base = OTHER; note = thymine
  modified_base 134: mod_base = OTHER; note = thymine
  modified_base 136..137: mod_base = OTHER; note = thymine
  modified_base 152: mod_base = OTHER; note = thymine
  modified_base 169: mod_base = OTHER; note = thymine
  modified_base 173: mod_base = OTHER; note = thymine
  modified_base 179: mod_base = OTHER; note = thymine
  modified_base 191: mod_base = OTHER; note = thymine
  modified_base 199: mod_base = OTHER; note = thymine
  modified_base 203: mod_base = OTHER; note = thymine
  modified_base 212: mod_base = OTHER; note = thymine
  modified_base 236: mod_base = OTHER; note = thymine
  modified_base 239: mod_base = OTHER; note = thymine
  modified_base 254: mod_base = OTHER; note = thymine
  modified_base 257: mod_base = OTHER; note = thymine
  modified_base 272: mod_base = OTHER; note = thymine
  modified_base 275: mod_base = OTHER; note = thymine
  modified_base 289..290: mod_base = OTHER; note = thymine
  modified_base 305: mod_base = OTHER; note = thymine
  modified_base 308: mod_base = OTHER; note = thymine
  modified_base 313: mod_base = OTHER; note = thymine
  modified_base 317: mod_base = OTHER; note = thymine
  modified_base 331: mod_base = OTHER; note = thymine
  modified_base 338: mod_base = OTHER; note = thymine
  modified_base 353: mod_base = OTHER; note = thymine
  modified_base 365: mod_base = OTHER; note = thymine
  modified_base 374: mod_base = OTHER; note = thymine
  modified_base 379: mod_base = OTHER; note = thymine
  modified_base 382: mod_base = OTHER; note = thymine
  modified_base 389: mod_base = OTHER; note = thymine
  modified_base 392: mod_base = OTHER; note = thymine
  modified_base 395: mod_base = OTHER; note = thymine
  modified_base 401: mod_base = OTHER; note = thymine
  modified_base 404: mod_base = OTHER; note = thymine
  modified_base 418: mod_base = OTHER; note = thymine
  modified_base 422: mod_base = OTHER; note = thymine
  modified_base 424: mod_base = OTHER; note = thymine
  modified_base 464: mod_base = OTHER; note = thymine
  modified_base 473: mod_base = OTHER; note = thymine
  modified_base 476: mod_base = OTHER; note = thymine
  modified_base 485: mod_base = OTHER; note = thymine
  modified_base 506: mod_base = OTHER; note = thymine
  modified_base 520..521: mod_base = OTHER; note = thymine
  modified_base 539: mod_base = OTHER; note = thymine
  modified_base 545: mod_base = OTHER; note = thymine
  modified_base 553..554: mod_base = OTHER; note = thymine
  modified_base 565: mod_base = OTHER; note = thymine
  modified_base 575: mod_base = OTHER; note = thymine
  modified_base 595: mod_base = OTHER; note = thymine
  modified_base 598: mod_base = OTHER; note = thymine
  modified_base 607..608: mod_base = OTHER; note = thymine
  modified_base 610: mod_base = OTHER; note = thymine
  modified_base 623: mod_base = OTHER; note = thymine
  modified_base 635: mod_base = OTHER; note = thymine
  modified_base 638: mod_base = OTHER; note = thymine
  modified_base 641: mod_base = OTHER; note = thymine
  modified_base 644: mod_base = OTHER; note = thymine
  modified_base 646..647: mod_base = OTHER; note = thymine
  modified_base 664..665: mod_base = OTHER; note = thymine
  modified_base 680: mod_base = OTHER; note = thymine
  modified_base 682: mod_base = OTHER; note = thymine
  modified_base 692: mod_base = OTHER; note = thymine
  modified_base 704: mod_base = OTHER; note = thymine
  modified_base 713: mod_base = OTHER; note = thymine
  modified_base 716: mod_base = OTHER; note = thymine
  modified_base 719: mod_base = OTHER; note = thymine
  modified_base 737: mod_base = OTHER; note = thymine
  modified_base 739: mod_base = OTHER; note = thymine
  modified_base 752: mod_base = OTHER; note = thymine
  modified_base 761: mod_base = OTHER; note = thymine
  modified_base 764: mod_base = OTHER; note = thymine
  modified_base 772: mod_base = OTHER; note = thymine
  modified_base 778..779: mod_base = OTHER; note = thymine
  modified_base 814: mod_base = OTHER; note = thymine
  modified_base 829..830: mod_base = OTHER; note = thymine
  modified_base 833: mod_base = OTHER; note = thymine
  modified_base 835: mod_base = OTHER; note = thymine
  modified_base 839: mod_base = OTHER; note = thymine
  modified_base 848: mod_base = OTHER; note = thymine
  modified_base 857: mod_base = OTHER; note = thymine
  modified_base 863: mod_base = OTHER; note = thymine
  modified_base 866: mod_base = OTHER; note = thymine
  modified_base 877: mod_base = OTHER; note = thymine
  modified_base 890: mod_base = OTHER; note = thymine
  modified_base 914: mod_base = OTHER; note = thymine
  modified_base 917: mod_base = OTHER; note = thymine
  modified_base 928: mod_base = OTHER; note = thymine
  modified_base 937: mod_base = OTHER; note = thymine
  modified_base 944: mod_base = OTHER; note = thymine
  modified_base 949: mod_base = OTHER; note = thymine
  modified_base 968: mod_base = OTHER; note = thymine
  modified_base 971: mod_base = OTHER; note = thymine
  modified_base 977: mod_base = OTHER; note = thymine
  modified_base 991..992: mod_base = OTHER; note = thymine
  modified_base 994..995: mod_base = OTHER; note = thymine
  modified_base 1004: mod_base = OTHER; note = thymine
  modified_base 1009: mod_base = OTHER; note = thymine
  modified_base 1033: mod_base = OTHER; note = thymine
  modified_base 1040: mod_base = OTHER; note = thymine
  modified_base 1043: mod_base = OTHER; note = thymine
  modified_base 1049: mod_base = OTHER; note = thymine
  modified_base 1057: mod_base = OTHER; note = thymine
  modified_base 1067: mod_base = OTHER; note = thymine
  modified_base 1069: mod_base = OTHER; note = thymine
  modified_base 1079: mod_base = OTHER; note = thymine
  modified_base 1094: mod_base = OTHER; note = thymine
  modified_base 1108: mod_base = OTHER; note = thymine
  modified_base 1115: mod_base = OTHER; note = thymine
  modified_base 1121: mod_base = OTHER; note = thymine
  modified_base 1123: mod_base = OTHER; note = thymine
  modified_base 1126: mod_base = OTHER; note = thymine
  modified_base 1133: mod_base = OTHER; note = thymine
  modified_base 1145: mod_base = OTHER; note = thymine
  modified_base 1156..1157: mod_base = OTHER; note = thymine
  modified_base 1159: mod_base = OTHER; note = thymine
  modified_base 1163: mod_base = OTHER; note = thymine
  modified_base 1165..1166: mod_base = OTHER; note = thymine
  modified_base 1184: mod_base = OTHER; note = thymine
  modified_base 1196: mod_base = OTHER; note = thymine
  modified_base 1208: mod_base = OTHER; note = thymine
  modified_base 1220: mod_base = OTHER; note = thymine
  modified_base 1223: mod_base = OTHER; note = thymine
  modified_base 1232: mod_base = OTHER; note = thymine
  modified_base 1235: mod_base = OTHER; note = thymine
  modified_base 1244: mod_base = OTHER; note = thymine
  modified_base 1246: mod_base = OTHER; note = thymine
  modified_base 1249..1250: mod_base = OTHER; note = thymine
  modified_base 1258..1259: mod_base = OTHER; note = thymine
  modified_base 1262: mod_base = OTHER; note = thymine
  modified_base 1268: mod_base = OTHER; note = thymine
  modified_base 1270: mod_base = OTHER; note = thymine
  modified_base 1274: mod_base = OTHER; note = thymine
  modified_base 1283: mod_base = OTHER; note = thymine
  modified_base 1292: mod_base = OTHER; note = thymine
  modified_base 1295: mod_base = OTHER; note = thymine
  modified_base 1301: mod_base = OTHER; note = thymine
  modified_base 1304: mod_base = OTHER; note = thymine
  modified_base 1321: mod_base = OTHER; note = thymine
  modified_base 1333: mod_base = OTHER; note = thymine
  modified_base 1343: mod_base = OTHER; note = thymine
  modified_base 1345: mod_base = OTHER; note = thymine
  modified_base 1357: mod_base = OTHER; note = thymine
  modified_base 1385: mod_base = OTHER; note = thymine
  modified_base 1387: mod_base = OTHER; note = thymine
  modified_base 1391: mod_base = OTHER; note = thymine
  modified_base 1400: mod_base = OTHER; note = thymine
  modified_base 1415: mod_base = OTHER; note = thymine
  modified_base 1427: mod_base = OTHER; note = thymine
  modified_base 1430: mod_base = OTHER; note = thymine
  modified_base 1433: mod_base = OTHER; note = thymine
  modified_base 1442: mod_base = OTHER; note = thymine
  modified_base 1444: mod_base = OTHER; note = thymine
  modified_base 1460: mod_base = OTHER; note = thymine
  modified_base 1463: mod_base = OTHER; note = thymine
  modified_base 1472: mod_base = OTHER; note = thymine
  modified_base 1475: mod_base = OTHER; note = thymine
  modified_base 1483: mod_base = OTHER; note = thymine
  modified_base 1489: mod_base = OTHER; note = thymine
  modified_base 1502: mod_base = OTHER; note = thymine
  modified_base 1508: mod_base = OTHER; note = thymine
  modified_base 1526: mod_base = OTHER; note = thymine
  modified_base 1534: mod_base = OTHER; note = thymine
  modified_base 1537..1538: mod_base = OTHER; note = thymine
  modified_base 1556: mod_base = OTHER; note = thymine
  modified_base 1609..1610: mod_base = OTHER; note = thymine
  modified_base 1618: mod_base = OTHER; note = thymine
  modified_base 1621..1622: mod_base = OTHER; note = thymine
  modified_base 1630..1631: mod_base = OTHER; note = thymine
  modified_base 1634: mod_base = OTHER; note = thymine
  modified_base 1648: mod_base = OTHER; note = thymine
  modified_base 1658: mod_base = OTHER; note = thymine
  modified_base 1661: mod_base = OTHER; note = thymine
  modified_base 1667: mod_base = OTHER; note = thymine
  modified_base 1673: mod_base = OTHER; note = thymine
  modified_base 1675: mod_base = OTHER; note = thymine
  modified_base 1696: mod_base = OTHER; note = thymine
  modified_base 1700: mod_base = OTHER; note = thymine
  modified_base 1702: mod_base = OTHER; note = thymine
  modified_base 1705: mod_base = OTHER; note = thymine
  modified_base 1718: mod_base = OTHER; note = thymine
  modified_base 1724: mod_base = OTHER; note = thymine
  modified_base 1727: mod_base = OTHER; note = thymine
  modified_base 1733: mod_base = OTHER; note = thymine
  modified_base 1747: mod_base = OTHER; note = thymine
  modified_base 1751: mod_base = OTHER; note = thymine
  modified_base 1757: mod_base = OTHER; note = thymine
  modified_base 1769: mod_base = OTHER; note = thymine
  modified_base 1774..1775: mod_base = OTHER; note = thymine
  modified_base 1777: mod_base = OTHER; note = thymine
  modified_base 1786: mod_base = OTHER; note = thymine
  modified_base 1795: mod_base = OTHER; note = thymine
  modified_base 1798..1799: mod_base = OTHER; note = thymine
  modified_base 1811: mod_base = OTHER; note = thymine
  modified_base 1814: mod_base = OTHER; note = thymine
  modified_base 1817: mod_base = OTHER; note = thymine
  modified_base 1820: mod_base = OTHER; note = thymine
  modified_base 1825: mod_base = OTHER; note = thymine
  modified_base 1858: mod_base = OTHER; note = thymine
  modified_base 1864: mod_base = OTHER; note = thymine
  modified_base 1867..1868: mod_base = OTHER; note = thymine
  modified_base 1885: mod_base = OTHER; note = thymine
  modified_base 1894: mod_base = OTHER; note = thymine
  modified_base 1903..1904: mod_base = OTHER; note = thymine
  modified_base 1916: mod_base = OTHER; note = thymine
  modified_base 1924: mod_base = OTHER; note = thymine
  modified_base 1930..1931: mod_base = OTHER; note = thymine
  modified_base 1939: mod_base = OTHER; note = thymine
  modified_base 1955: mod_base = OTHER; note = thymine
  modified_base 1958: mod_base = OTHER; note = thymine
  modified_base 1961: mod_base = OTHER; note = thymine
  modified_base 1969..1970: mod_base = OTHER; note = thymine
  modified_base 1984..1985: mod_base = OTHER; note = thymine
  modified_base 1993: mod_base = OTHER; note = thymine
  modified_base 2000: mod_base = OTHER; note = thymine
  modified_base 2014: mod_base = OTHER; note = thymine
  modified_base 2018: mod_base = OTHER; note = thymine
  modified_base 2026..2027: mod_base = OTHER; note = thymine
  modified_base 2030: mod_base = OTHER; note = thymine
  modified_base 2032: mod_base = OTHER; note = thymine
  modified_base 2038..2039: mod_base = OTHER; note = thymine
  modified_base 2042: mod_base = OTHER; note = thymine
  modified_base 2054: mod_base = OTHER; note = thymine
  modified_base 2057: mod_base = OTHER; note = thymine
  modified_base 2060: mod_base = OTHER; note = thymine
  modified_base 2084: mod_base = OTHER; note = thymine
  modified_base 2086..2087: mod_base = OTHER; note = thymine
  modified_base 2092: mod_base = OTHER; note = thymine
  modified_base 2105: mod_base = OTHER; note = thymine
  modified_base 2114: mod_base = OTHER; note = thymine
  modified_base 2117: mod_base = OTHER; note = thymine
  modified_base 2125..2126: mod_base = OTHER; note = thymine
  modified_base 2128: mod_base = OTHER; note = thymine
  modified_base 2135: mod_base = OTHER; note = thymine
  modified_base 2144: mod_base = OTHER; note = thymine
  modified_base 2174: mod_base = OTHER; note = thymine
  modified_base 2183: mod_base = OTHER; note = thymine
  modified_base 2186: mod_base = OTHER; note = thymine
  modified_base 2189: mod_base = OTHER; note = thymine
  modified_base 2194: mod_base = OTHER; note = thymine
  modified_base 2197: mod_base = OTHER; note = thymine
  modified_base 2204: mod_base = OTHER; note = thymine
  modified_base 2210: mod_base = OTHER; note = thymine
  modified_base 2222: mod_base = OTHER; note = thymine
  modified_base 2230..2231: mod_base = OTHER; note = thymine
  modified_base 2234: mod_base = OTHER; note = thymine
  modified_base 2239: mod_base = OTHER; note = thymine
  modified_base 2249: mod_base = OTHER; note = thymine
  modified_base 2257..2258: mod_base = OTHER; note = thymine
  modified_base 2273: mod_base = OTHER; note = thymine
  modified_base 2294: mod_base = OTHER; note = thymine
  modified_base 2297: mod_base = OTHER; note = thymine
  modified_base 2314..2315: mod_base = OTHER; note = thymine
  modified_base 2326: mod_base = OTHER; note = thymine
  modified_base 2332..2333: mod_base = OTHER; note = thymine
  modified_base 2335..2336: mod_base = OTHER; note = thymine
  modified_base 2348: mod_base = OTHER; note = thymine
  modified_base 2351: mod_base = OTHER; note = thymine
  modified_base 2354: mod_base = OTHER; note = thymine
  modified_base 2360: mod_base = OTHER; note = thymine
  modified_base 2362..2363: mod_base = OTHER; note = thymine
  modified_base 2389..2390: mod_base = OTHER; note = thymine
  modified_base 2417: mod_base = OTHER; note = thymine
  modified_base 2426: mod_base = OTHER; note = thymine
  modified_base 2429: mod_base = OTHER; note = thymine
  modified_base 2441: mod_base = OTHER; note = thymine
  modified_base 2443: mod_base = OTHER; note = thymine
  modified_base 2446: mod_base = OTHER; note = thymine
  modified_base 2462: mod_base = OTHER; note = thymine
  modified_base 2470: mod_base = OTHER; note = thymine
  modified_base 2474: mod_base = OTHER; note = thymine
  modified_base 2483: mod_base = OTHER; note = thymine
  modified_base 2485..2486: mod_base = OTHER; note = thymine
  modified_base 2489: mod_base = OTHER; note = thymine
  modified_base 2491: mod_base = OTHER; note = thymine
  modified_base 2513: mod_base = OTHER; note = thymine
  modified_base 2515: mod_base = OTHER; note = thymine
  modified_base 2537: mod_base = OTHER; note = thymine
  modified_base 2542: mod_base = OTHER; note = thymine
  modified_base 2554..2555: mod_base = OTHER; note = thymine
  modified_base 2558: mod_base = OTHER; note = thymine
  modified_base 2576: mod_base = OTHER; note = thymine
  modified_base 2578: mod_base = OTHER; note = thymine
  modified_base 2582: mod_base = OTHER; note = thymine
  modified_base 2591: mod_base = OTHER; note = thymine
  modified_base 2593: mod_base = OTHER; note = thymine
  modified_base 2597: mod_base = OTHER; note = thymine
  modified_base 2606: mod_base = OTHER; note = thymine
  modified_base 2612: mod_base = OTHER; note = thymine
  modified_base 2621: mod_base = OTHER; note = thymine
  modified_base 2630: mod_base = OTHER; note = thymine
  modified_base 2633: mod_base = OTHER; note = thymine
  modified_base 2638: mod_base = OTHER; note = thymine
  modified_base 2657: mod_base = OTHER; note = thymine
  modified_base 2663: mod_base = OTHER; note = thymine
  modified_base 2665: mod_base = OTHER; note = thymine
  modified_base 2675: mod_base = OTHER; note = thymine
  modified_base 2687: mod_base = OTHER; note = thymine
  modified_base 2695: mod_base = OTHER; note = thymine
  modified_base 2719..2720: mod_base = OTHER; note = thymine
  modified_base 2740..2741: mod_base = OTHER; note = thymine
  modified_base 2743: mod_base = OTHER; note = thymine
  modified_base 2762: mod_base = OTHER; note = thymine
  modified_base 2765: mod_base = OTHER; note = thymine
  modified_base 2774: mod_base = OTHER; note = thymine
  modified_base 2780: mod_base = OTHER; note = thymine
  modified_base 2797: mod_base = OTHER; note = thymine
  modified_base 2804: mod_base = OTHER; note = thymine
  modified_base 2807: mod_base = OTHER; note = thymine
  modified_base 2810: mod_base = OTHER; note = thymine
  modified_base 2827: mod_base = OTHER; note = thymine
  modified_base 2834: mod_base = OTHER; note = thymine
  modified_base 2852: mod_base = OTHER; note = thymine
  modified_base 2855: mod_base = OTHER; note = thymine
  modified_base 2861: mod_base = OTHER; note = thymine
  modified_base 2867: mod_base = OTHER; note = thymine
  modified_base 2869..2870: mod_base = OTHER; note = thymine
  modified_base 2872: mod_base = OTHER; note = thymine
  modified_base 2879: mod_base = OTHER; note = thymine
  modified_base 2902: mod_base = OTHER; note = thymine
  modified_base 2905..2906: mod_base = OTHER; note = thymine
  modified_base 2909: mod_base = OTHER; note = thymine
  modified_base 2912: mod_base = OTHER; note = thymine
  modified_base 2918: mod_base = OTHER; note = thymine
  modified_base 2920: mod_base = OTHER; note = thymine
  modified_base 2926: mod_base = OTHER; note = thymine
  modified_base 2933: mod_base = OTHER; note = thymine
  modified_base 2945: mod_base = OTHER; note = thymine
  modified_base 2948: mod_base = OTHER; note = thymine
  modified_base 2957: mod_base = OTHER; note = thymine
  modified_base 2962: mod_base = OTHER; note = thymine
  modified_base 2971: mod_base = OTHER; note = thymine
  modified_base 2978: mod_base = OTHER; note = thymine
  modified_base 2986: mod_base = OTHER; note = thymine
  modified_base 2989: mod_base = OTHER; note = thymine
  modified_base 2995..2996: mod_base = OTHER; note = thymine
  modified_base 2998: mod_base = OTHER; note = thymine
  modified_base 3001..3002: mod_base = OTHER; note = thymine
  modified_base 3004: mod_base = OTHER; note = thymine
  modified_base 3008: mod_base = OTHER; note = thymine
  modified_base 3016: mod_base = OTHER; note = thymine
  modified_base 3023: mod_base = OTHER; note = thymine
  modified_base 3026: mod_base = OTHER; note = thymine
  modified_base 3031..3032: mod_base = OTHER; note = thymine
  modified_base 3049: mod_base = OTHER; note = thymine
  modified_base 3056: mod_base = OTHER; note = thymine
  modified_base 3061..3062: mod_base = OTHER; note = thymine
  modified_base 3067: mod_base = OTHER; note = thymine
  modified_base 3070: mod_base = OTHER; note = thymine
  modified_base 3074: mod_base = OTHER; note = thymine
  modified_base 3079: mod_base = OTHER; note = thymine
  modified_base 3085: mod_base = OTHER; note = thymine
  modified_base 3088: mod_base = OTHER; note = thymine
  modified_base 3100..3101: mod_base = OTHER; note = thymine
  modified_base 3103: mod_base = OTHER; note = thymine
  modified_base 3107: mod_base = OTHER; note = thymine
  modified_base 3112: mod_base = OTHER; note = thymine
  modified_base 3127: mod_base = OTHER; note = thymine
  modified_base 3142..3143: mod_base = OTHER; note = thymine
  modified_base 3149: mod_base = OTHER; note = thymine
  modified_base 3151: mod_base = OTHER; note = thymine
  modified_base 3164: mod_base = OTHER; note = thymine
  modified_base 3167: mod_base = OTHER; note = thymine
  modified_base 3170: mod_base = OTHER; note = thymine
  modified_base 3173: mod_base = OTHER; note = thymine
  modified_base 3181: mod_base = OTHER; note = thymine
  modified_base 3188: mod_base = OTHER; note = thymine
  modified_base 3197: mod_base = OTHER; note = thymine
  modified_base 3209: mod_base = OTHER; note = thymine
  modified_base 3217: mod_base = OTHER; note = thymine
  modified_base 3224: mod_base = OTHER; note = thymine
  modified_base 3242: mod_base = OTHER; note = thymine
  misc_feature 1..3249: note = Synthetic
  source 1..3249: mol_type = other RNA
atggccgccttcaagcccaaccccatcaactacatcctgggcctggccatcggcatcgcctccgtgggctgggccatggtggagatcgacgaggaggagaaccccatccggctgatcgacctgggcgtgcgggtgttcgagcgggccgaggtgcccaagaccggcgactccctggccatggcccggcggctggcccggtccgtgcggcggctgacccggcggcgggcccaccggctgctgcgggcccggcggctgctgaagcgggagggcgtgctgcaggccgccgacttcgacgagaacggcctgatcaagtccctgcccaacaccccctggcagctgcgggccgccgccctggaccggaagctgacccccctggagtggtccgccgtgctgctgcacctgatcaagcaccggggctacctgtcccagcggaagaacgagggcgagaccgccgacaaggagctgggcgccctgctgaagggcgtggccaacaacgcccacgccctgcagaccggcgacttccggacccccgccgagctggccctgaacaagttcgagaaggagtccggccacatccggaaccagcggggcgactactcccacaccttctcccggaaggacctgcaggccgagctgatcctgctgttcgagaagcagaaggagttcggcaacccccacgtgtccggcggcctgaaggagggcatcgagaccctgctgatgacccagcggcccgccctgtccggcgacgccgtgcagaagatgctgggccactgcaccttcgagcccgccgagcccaaggccgccaagaacacctacaccgccgagcggttcatctggctgaccaagctgaacaacctgcggatcctggagcagggctccgagcggcccctgaccgacaccgagcgggccaccctgatggacgagccctaccggaagtccaagctgacctacgcccaggcccggaagctgctgggcctggaggacaccgccttcttcaagggcctgcggtacggcaaggacaacgccgaggcctccaccctgatggagatgaaggcctaccacgccatctcccgggccctggagaaggagggcctgaaggacaagaagtcccccctgaacctgtcctccgagctgcaggacgagatcggcaccgccttctccctgttcaagaccgacgaggacatcaccggccggctgaaggaccgggtgcagcccgagatcctggaggccctgctgaagcacatctccttcgacaagttcgtgcagatctccctgaaggccctgcggcggatcgtgcccctgatggagcagggcaagcggtacgacgaggcctgcgccgagatctacggcgaccactacggcaagaagaacaccgaggagaagatctacctgccccccatccccgccgacgagatccggaaccccgtggtgctgcgggccctgtcccaggcccggaaggtgatcaacggcgtggtgcggcggtacggctcccccgcccggatccacatcgagaccgcccgggaggtgggcaagtccttcaaggaccggaaggagatcgagaagcggcaggaggagaaccggaaggaccgggagaaggccgccgccaagttccgggagtacttccccaacttcgtgggcgagcccaagtccaaggacatcctgaagctgcggctgtacgagcagcagcacggcaagtgcctgtactccggcaaggagatcaacctggtgcggctgaacgagaagggctacgtggagatcgacgccgccctgcccttctcccggacctgggacgactccttcaacaacaaggtgctggtgctgggctccgagaaccagaacaagggcaaccagaccccctacgagtacttcaacggcaaggacaactcccgggagtggcaggagttcaaggcccgggtggagacctcccggttcccccggtccaagaagcagcggatcctgctgcagaagttcgacgaggacggcttcaaggagtgcaacctgaacgacacccggtacgtgaaccggttcctgtgccagttcgtggccgaccacatcctgctgaccggcaagggcaagcggcgggtgttcgcctccaacggccagatcaccaacctgctgcggggcttctggggcctgcggaaggtgcgggccgagaacgaccggcaccacgccctggacgccgtggtggtggcctgctccaccgtggccatgcagcagaagatcacccggttcgtgcggtacaaggagatgaacgccttcgacggcaagaccatcgacaaggagaccggcaaggtgctgcaccagaagacccacttcccccagccctgggagttcttcgcccaggaggtgatgatccgggtgttcggcaagcccgacggcaagcccgagttcgaggaggccgacacccccgagaagctgcggaccctgctggccgagaagctgtcctcccggcccgaggccgtgcacgagtacgtgacccccctgttcgtgtcccgggcccccaaccggaagatgtccggcgcccacaaggacaccctgcggtccgccaagcggttcgtgaagcacaacgagaagatctccgtgaagcgggtgtggctgaccgagatcaagctggccgacctggagaacatggtgaactacaagaacggccgggagatcgagctgtacgaggccctgaaggcccggctggaggcctacggcggcaacgccaagcaggccttcgaccccaaggacaaccccttctacaagaagggcggccagctggtgaaggccgtgcgggtggagaagacccaggagtccggcgtgctgctgaacaagaagaacgcctacaccatcgccgacaacggcgacatggtgcgggtggacgtgttctgcaaggtggacaagaagggcaagaaccagtacttcatcgtgcccatctacgcctggcaggtggccgagaacatcctgcccgacatcgactgcaagggctaccggatcgacgactcctacaccttctgcttctccctgcacaagtacgacctgatcgccttccagaaggacgagaagtccaaggtggagttcgcctactacatcaactgcgactcctccaacggccggttctacctggcctggcacgacaagggctccaaggagcagcagttccggatctccacccagaacctggtgctgatccagaagtaccaggtgaacgagctgggcaaggagatccggccctgccggctgaagaagcggccccccgtgcggtaa

SEQ ID NO: 262 - protein, 1082 aa, synthetic construct
  REGION 1..1082: note = Synthetic
MAAFKPNPINYILGLAIGIASVGWAMVEIDEEENPIRLIDLGVRVFERAEVPKTGDSLAMARRLARSVRRLTRRRAHRLLRARRLLKREGVLQAADFDENGLIKSLPNTPWQLRAAALDRKLTPLEWSAVLLHLIKHRGYLSQRKNEGETADKELGALLKGVANNAHALQTGDFRTPAELALNKFEKESGHIRNQRGDYSHTFSRKDLQAELILLFEKQKEFGNPHVSGGLKEGIETLLMTQRPALSGDAVQKMLGHCTFEPAEPKAAKNTYTAERFIWLTKLNNLRILEQGSERPLTDTERATLMDEPYRKSKLTYAQARKLLGLEDTAFFKGLRYGKDNAEASTLMEMKAYHAISRALEKEGLKDKKSPLNLSSELQDEIGTAFSLFKTDEDITGRLKDRVQPEILEALLKHISFDKFVQISLKALRRIVPLMEQGKRYDEACAEIYGDHYGKKNTEEKIYLPPIPADEIRNPVVLRALSQARKVINGVVRRYGSPARIHIETAREVGKSFKDRKEIEKRQEENRKDREKAAAKFREYFPNFVGEPKSKDILKLRLYEQQHGKCLYSGKEINLVRLNEKGYVEIDHALPFSRTWDDSFNNKVLVLGSENQNKGNQTPYEYFNGKDNSREWQEFKARVETSRFPRSKKQRILLQKFDEDGFKECNLNDTRYVNRFLCQFVADHILLTGKGKRRVFASNGQITNLLRGFWGLRKVRAENDRHHALDAVVVACSTVAMQQKITRFVRYKEMNAFDGKTIDKETGKVLHQKTHFPQPWEFFAQEVMIRVFGKPDGKPEFEEADTPEKLRTLLAEKLSSRPEAVHEYVTPLFVSRAPNRKMSGAHKDTLRSAKRFVKHNEKISVKRVWLTEIKLADLENMVNYKNGREIELYEALKARLEAYGGNAKQAFDPKDNPFYKKGGQLVKAVRVEKTQESGVLLNKKNAYTIADNGDMVRVDVFCKVDKKGKNQYFIVPIYAWQVAENILPDIDCKGYRIDDSYTFCFSLHKYDLIAFQKDEKSKVEFAYYINCDSSNGRFYLAWHDKGSKEQQFRISTQNLVLIQKYQVNELGKEIRPCRLKKRPPVR

SEQ ID NO: 263 - DNA, 3243 bp, synthetic construct
  misc_feature 1..3243: note = Synthetic
  source 1..3243: mol_type = other DNA
gctgcttttaagcctaatcctattaattatattcttggtcttgctattggtattgcttctgttggttgggctatggttgagattgatgaggaggagaatcctattcgtcttattgatcttggtgttcgtgtttttgagcgtgctgaggttcctaagactggtgattctcttgctatggctcgtcgtcttgctcgttctgttcgtcgtcttactcgtcgtcgtgctcatcgtcttcttcgtgctcgtcgtcttcttaagcgtgagggtgttcttcaggctgctgattttgatgagaatggtcttattaagtctcttcctaatactccttggcagcttcgtgctgctgctcttgatcgtaagcttactcctcttgagtggtctgctgttcttcttcatcttattaagcatcgtggttatctttctcagcgtaagaatgagggtgagactgctgataaggagcttggtgctcttcttaagggtgttgctaataatgctcatgctcttcagactggtgattttcgtactcctgctgagcttgctcttaataagtttgagaaggagtctggtcatattcgtaatcagcgtggtgattattctcatactttttctcgtaaggatcttcaggctgagcttattcttctttttgagaagcagaaggagtttggtaatcctcatgtttctggtggtcttaaggagggtattgagactcttcttatgactcagcgtcctgctctttctggtgatgctgttcagaagatgcttggtcattgtacttttgagcctgctgagcctaaggctgctaagaatacttatactgctgagcgttttatttggcttactaagcttaataatcttcgtattcttgagcagggttctgagcgtcctcttactgatactgagcgtgctactcttatggatgagccttatcgtaagtctaagcttacttatgctcaggctcgtaagcttcttggtcttgaggatactgctttttttaagggtcttcgttatggtaaggataatgctgaggcttctactcttatggagatgaaggcttatcatgctatttctcgtgctcttgagaaggagggtcttaaggataagaagtctcctcttaatctttcttctgagcttcaggatgagattggtactgctttttctctttttaagactgatgaggatattactggtcgtcttaaggatcgtgttcagcctgagattcttgaggctcttcttaagcatatttcttttgataagtttgttcagatttctcttaaggctcttcgtcgtattgttcctcttatggagcagggtaagcgttatgatgaggcttgtgctgagatttatggtgatcattatggtaagaagaatactgaggagaagatttatcttcctcctattcctgctgatgagattcgtaatcctgttgttcttcgtgctctttctcaggctcgtaaggttattaatggtgttgttcgtcgttatggttctcctgctcgtattcatattgagactgctcgtgaggttggtaagtcttttaaggatcgtaaggagattgagaagcgtcaggaggagaatcgtaaggatcgtgagaaggctgctgctaagtttcgtgagtattttcctaattttgttggtgagcctaagtctaaggatattcttaagcttcgtctttatgagcagcagcatggtaagtgtctttattctggtaaggagattaatcttgttcgtcttaatgagaagggttatgttgagattgatcatgctcttcctttttctcgtacttgggatgattcttttaataataaggttcttgttcttggttctgagaatcagaataagggtaatcagactccttatgagtattttaatggtaaggataattctcgtgagtggcaggagtttaaggctcgtgttgagacttctcgttttcctcgttctaagaagcagcgtattcttcttcagaagtttgatgaggatggttttaaggagtgtaatcttaatgatactcgttatgttaatcgttttctttgtcagtttgttgctgatcatattcttcttactggtaagggtaagcgtcgtgtttttgcttctaatggtcagattactaatcttcttcgtggtttttggggtcttcgtaaggttcgtgctgagaatgatcgtcatcatgctcttgatgctgttgttgttgcttgttctactgttgctatgcagcagaagattactcgttttgttcgttataaggagatgaatgcttttgatggtaagactattgataaggagactggtaaggttcttcatcagaagactcattttcctcagccttgggagttttttgctcaggaggttatgattcgtgtttttggtaagcctgatggtaagcctgagtttgaggaggctgatactcctgagaagcttcgtactcttcttgctgagaagctttcttctcgtcctgaggctgttcatgagtatgttactcctctttttgtttctcgtgctcctaatcgtaagatgtctggtgctcataaggatactcttcgttctgctaagcgttttgttaagcataatgagaagatttctgttaagcgtgtttggcttactgagattaagcttgctgatcttgagaatatggttaattataagaatggtcgtgagattgagctttatgaggctcttaaggctcgtcttgaggcttatggtggtaatgctaagcaggcttttgatcctaaggataatcctttttataagaagggtggtcagcttgttaaggctgttcgtgttgagaagactcaggagtctggtgttcttcttaataagaagaatgcttatactattgctgataatggtgatatggttcgtgttgatgttttttgtaaggttgataagaagggtaagaatcagtattttattgttcctatttatgcttggcaggttgctgagaatattcttcctgatattgattgtaagggttatcgtattgatgattcttatactttttgtttttctcttcataagtatgatcttattgcttttcagaaggatgagaagtctaaggttgagtttgcttattatattaattgtgattcttctaatggtcgtttttatcttgcttggcatgataagggttctaaggagcagcagtttcgtatttctactcagaatcttgttcttattcagaagtatcaggttaatgagcttggtaaggagattcgtccttgtcgtcttaagaagcgtcctcctgttcgt

SEQ ID NO: 264 - DNA, 3243 bp, synthetic construct
  misc_feature 1..3243: note = Synthetic
  source 1..3243: mol_type = other DNA
gccgccttcaagcccaaccccatcaactacatcctgggcctggccatcggcatcgcctccgtgggctgggccatggtggagatcgacgaggaggagaaccccatccggctgatcgacctgggcgtgcgggtgttcgagcgggccgaggtgcccaagaccggcgactccctggccatggcccggcggctggcccggtccgtgcggcggctgacccggcggcgggcccaccggctgctgcgggcccggcggctgctgaagcgggagggcgtgctgcaggccgccgacttcgacgagaacggcctgatcaagtccctgcccaacaccccctggcagctgcgggccgccgccctggaccggaagctgacccccctggagtggtccgccgtgctgctgcacctgatcaagcaccggggctacctgtcccagcggaagaacgagggcgagaccgccgacaaggagctgggcgccctgctgaagggcgtggccaacaacgcccacgccctgcagaccggcgacttccggacccccgccgagctggccctgaacaagttcgagaaggagtccggccacatccggaaccagcggggcgactactcccacaccttctcccggaaggacctgcaggccgagctgatcctgctgttcgagaagcagaaggagttcggcaacccccacgtgtccggcggcctgaaggagggcatcgagaccctgctgatgacccagcggcccgccctgtccggcgacgccgtgcagaagatgctgggccactgcaccttcgagcccgccgagcccaaggccgccaagaacacctacaccgccgagcggttcatctggctgaccaagctgaacaacctgcggatcctggagcagggctccgagcggcccctgaccgacaccgagcgggccaccctgatggacgagccctaccggaagtccaagctgacctacgcccaggcccggaagctgctgggcctggaggacaccgccttcttcaagggcctgcggtacggcaaggacaacgccgaggcctccaccctgatggagatgaaggcctaccacgccatctcccgggccctggagaaggagggcctgaaggacaagaagtcccccctgaacctgtcctccgagctgcaggacgagatcggcaccgccttctccctgttcaagaccgacgaggacatcaccggccggctgaaggaccgggtgcagcccgagatcctggaggccctgctgaagcacatctccttcgacaagttcgtgcagatctccctgaaggccctgcggcggatcgtgcccctgatggagcagggcaagcggtacgacgaggcctgcgccgagatctacggcgaccactacggcaagaagaacaccgaggagaagatctacctgccccccatccccgccgacgagatccggaaccccgtggtgctgcgggccctgtcccaggcccggaaggtgatcaacggcgtggtgcggcggtacggctcccccgcccggatccacatcgagaccgcccgggaggtgggcaagtccttcaaggaccggaaggagatcgagaagcggcaggaggagaaccggaaggaccgggagaaggccgccgccaagttccgggagtacttccccaacttcgtgggcgagcccaagtccaaggacatcctgaagctgcggctgtacgagcagcagcacggcaagtgcctgtactccggcaaggagatcaacctggtgcggctgaacgagaagggctacgtggagatcgaccacgccctgcccttctcccggacctgggacgactccttcaacaacaaggtgctggtgctgggctccgagaaccagaacaagggcaaccagaccccctacgagtacttcaacggcaaggacaactcccgggagtggcaggagttcaaggcccgggtggagacctcccggttcccccggtccaagaagcagcggatcctgctgcagaagttcgacgaggacggcttcaaggagtgcaacctgaacgacacccggtacgtgaaccggttcctgtgccagttcgtggccgaccacatcctgctgaccggcaagggcaagcggcgggtgttcgcctccaacggccagatcaccaacctgctgcggggcttctggggcctgcggaaggtgcgggccgagaacgaccggcaccacgccctggacgccgtggtggtggcctgctccaccgtggccatgcagcagaagatcacccggttcgtgcggtacaaggagatgaacgccttcgacggcaagaccatcgacaaggagaccggcaaggtgctgcaccagaagacccacttcccccagccctgggagttcttcgcccaggaggtgatgatccgggtgttcggcaagcccgacggcaagcccgagttcgaggaggccgacacccccgagaagctgcggaccctgctggccgagaagctgtcctcccggcccgaggccgtgcacgagtacgtgacccccctgttcgtgtcccgggcccccaaccggaagatgtccggcgcccacaaggacaccctgcggtccgccaagcggttcgtgaagcacaacgagaagatctccgtgaagcgggtgtggctgaccgagatcaagctggccgacctggagaacatggtgaactacaagaacggccgggagatcgagctgtacgaggccctgaaggcccggctggaggcctacggcggcaacgccaagcaggccttcgaccccaaggacaaccccttctacaagaagggcggccagctggtgaaggccgtgcgggtggagaagacccaggagtccggcgtgctgctgaacaagaagaacgcctacaccatcgccgacaacggcgacatggtgcgggtggacgtgttctgcaaggtggacaagaagggcaagaaccagtacttcatcgtgcccatctacgcctggcaggtggccgagaacatcctgcccgacatcgactgcaagggctaccggatcgacgactcctacaccttctgcttctccctgcacaagtacgacctgatcgccttccagaaggacgagaagtccaaggtggagttcgcctactacatcaactgcgactcctccaacggccggttctacctggcctggcacgacaagggctccaaggagcagcagttccggatctccacccagaacctggtgctgatccagaagtaccaggtgaacgagctgggcaaggagatccggccctgccggctgaagaagcggccccccgtgcgg

SEQ ID NO: 265 - DNA, 3243 bp, synthetic construct; identical to SEQ ID NO: 264
  misc_feature 1..3243: note = Synthetic
  source 1..3243: mol_type = other DNA

SEQ ID NO: 266 - RNA, 3249 nt, synthetic construct
  modified_base 2: mod_base = OTHER; note = thymine
  modified_base 6: mod_base = OTHER; note = thymine
  modified_base 9..12: mod_base = OTHER; note = thymine
  modified_base 18: mod_base = OTHER; note = thymine
  modified_base 21: mod_base = OTHER; note = thymine
  modified_base 24: mod_base = OTHER; note = thymine
  modified_base 26..27: mod_base = OTHER; note = thymine
  modified_base 30..31: mod_base = OTHER; note = thymine
  modified_base 33: mod_base = OTHER; note = thymine
  modified_base 35..36: mod_base = OTHER; note = thymine
  modified_base 38..39: mod_base = OTHER; note = thymine
  modified_base 42: mod_base = OTHER; note = thymine
  modified_base 44..45: mod_base = OTHER; note = thymine
  modified_base 48: mod_base = OTHER; note = thymine
  modified_base 50..51: mod_base = OTHER; note = thymine
  modified_base 54: mod_base = OTHER; note = thymine
  modified_base 56..57: mod_base = OTHER; note = thymine
  modified_base 60..61: mod_base = OTHER; note = thymine
  modified_base 63: mod_base = OTHER; note = thymine
  modified_base 65..66: mod_base = OTHER; note = thymine
  modified_base 69..70: mod_base = OTHER; note = thymine
  modified_base 75: mod_base = OTHER; note = thymine
  modified_base 77: mod_base = OTHER; note = thymine
  modified_base 80..81: mod_base = OTHER; note = thymine
  modified_base 86..87: mod_base = OTHER; note = thymine
  modified_base 90: mod_base = OTHER; note = thymine
  modified_base 102: mod_base = OTHER; note = thymine
  modified_base 105: mod_base = OTHER; note = thymine
  modified_base 107..108: mod_base = OTHER; note = thymine
  modified_base 111: mod_base = OTHER; note = thymine
  modified_base 113..114: mod_base = OTHER; note = thymine
  modified_base 116..117: mod_base = OTHER; note = thymine
  modified_base 120: mod_base = OTHER; note = thymine
  modified_base 122..123: mod_base = OTHER; note = thymine
  modified_base 126: mod_base = OTHER; note = thymine
  modified_base 128..129: mod_base = OTHER; note = thymine
  modified_base 132: mod_base = OTHER; note = thymine
  modified_base 134..138: mod_base = OTHER; note = thymine
  modified_base 144: mod_base = OTHER; note = thymine
  modified_base 147: mod_base = OTHER; note = thymine
  modified_base 152..153: mod_base = OTHER; note = thymine
  modified_base 156: mod_base = OTHER; note = thymine
  modified_base 162: mod_base = OTHER; note = thymine
  modified_base 165: mod_base = OTHER; note = thymine
  modified_base 168..169: mod_base = OTHER; note = thymine
  modified_base 171: mod_base = OTHER; note = thymine
  modified_base 173..174: mod_base = OTHER; note = thymine
  modified_base 177: mod_base = OTHER; note = thymine
  modified_base 179: mod_base = OTHER; note = thymine
  modified_base 183: mod_base = OTHER; note = thymine
  modified_base 186: mod_base = OTHER; note = thymine
  modified_base 189: mod_base = OTHER; note = thymine
  modified_base 191..192: mod_base = OTHER; note = thymine
  modified_base 195: mod_base = OTHER; note = thymine
  modified_base 198..199: mod_base = OTHER; note = thymine
  modified_base 201: mod_base = OTHER; note = thymine
  modified_base 203..204: mod_base = OTHER; note = thymine
  modified_base 207: mod_base = OTHER; note = thymine
  modified_base 210: mod_base = OTHER; note = thymine
  modified_base 212..213: mod_base = OTHER; note = thymine
  modified_base 216: mod_base = OTHER; note = thymine
  modified_base 219: mod_base = OTHER; note = thymine
  modified_base 222: mod_base = OTHER; note = thymine
  modified_base 225: mod_base = OTHER; note = thymine
  modified_base 228: mod_base = OTHER; note = thymine
  modified_base 231: mod_base = OTHER; note = thymine
  modified_base 234: mod_base = OTHER; note = thymine
  modified_base 236..237: mod_base = OTHER; note = thymine
  modified_base 239..240: mod_base = OTHER; note = thymine
  modified_base 243: mod_base = OTHER; note = thymine
  modified_base 246: mod_base = OTHER; note = thymine
  modified_base 249: mod_base = OTHER; note = thymine
  modified_base 252: mod_base = OTHER; note = thymine
  modified_base 254..255: mod_base = OTHER; note = thymine
  modified_base 257..258: mod_base = OTHER; note = thymine
  modified_base 264: mod_base = OTHER; note = thymine
  modified_base 270: mod_base = OTHER; note = thymine
  modified_base 272..273: mod_base = OTHER; note = thymine
  modified_base 275..276: mod_base = OTHER; note = thymine
  modified_base 282: mod_base = OTHER; note = thymine
  modified_base 285: mod_base = OTHER; note = thymine
  modified_base 288..291: mod_base = OTHER; note = thymine
  modified_base 294: mod_base = OTHER; note = thymine
  modified_base 300: mod_base = OTHER; note = thymine
  modified_base 303: mod_base = OTHER; note = thymine
  modified_base 305..306: mod_base = OTHER; note = thymine
  modified_base 308..309: mod_base = OTHER; note = thymine
  modified_base 313: mod_base = OTHER; note = thymine
  modified_base 315: mod_base = OTHER; note = thymine
  modified_base 317..318: mod_base = OTHER; note = thymine
  modified_base 321: mod_base = OTHER; note = thymine
  modified_base 324: mod_base = OTHER; note = thymine
  modified_base 327: mod_base = OTHER; note = thymine
  modified_base 330..331: mod_base = OTHER; note = thymine
  modified_base 338..339: mod_base = OTHER; note = thymine
  modified_base 342: mod_base = OTHER; note = thymine
  modified_base 345: mod_base = OTHER; note = thymine
  modified_base 348: mod_base = OTHER; note = thymine
  modified_base 351: mod_base = OTHER; note = thymine
  modified_base 353..354: mod_base = OTHER; note = thymine
  modified_base 357: mod_base = OTHER; note = thymine
  modified_base 360: mod_base = OTHER; note = thymine
  modified_base 365..366: mod_base = OTHER; note = thymine
  modified_base 369: mod_base = OTHER; note = thymine
  modified_base 372: mod_base = OTHER; note = thymine
  modified_base 374..375: mod_base = OTHER; note = thymine
  modified_base 379: mod_base = OTHER; note = thymine
  modified_base 382: mod_base = OTHER; note = thymine
  modified_base 384: mod_base = OTHER; note = thymine
  modified_base 387: mod_base = OTHER; note = thymine
  modified_base 389..390: mod_base = OTHER; note = thymine
  modified_base 392..393: mod_base = OTHER; note = thymine
  modified_base 395..396: mod_base = OTHER; note = thymine
  modified_base 399: mod_base = OTHER; note = thymine
  modified_base 401..402: mod_base = OTHER; note = thymine
  modified_base 404..405: mod_base = OTHER; note = thymine
  modified_base 411: mod_base = OTHER; note = thymine
  modified_base 414: mod_base = OTHER; note = thymine
  modified_base 417..418: mod_base = OTHER; note = thymine
  modified_base 420: mod_base = OTHER; note = thymine
  modified_base 422..424: mod_base = OTHER; note = thymine
  modified_base 426: mod_base = OTHER; note = thymine
  modified_base 432: mod_base = OTHER; note = thymine
  modified_base 438: mod_base = OTHER; note = thymine
  modified_base 444: mod_base = OTHER; note = thymine
  modified_base 450: mod_base = OTHER; note = thymine
  modified_base 453: mod_base = OTHER; note = thymine
  modified_base 456: mod_base = OTHER; note = thymine
  modified_base 464..465: mod_base = OTHER; note = thymine
  modified_base 468: mod_base = OTHER; note = thymine
  modified_base 471: mod_base = OTHER; note = thymine
  modified_base 473..474: mod_base = OTHER; note = thymine
  modified_base 476..477: mod_base = OTHER; note = thymine
  modified_base 483: mod_base = OTHER; note = thymine
  modified_base 485..486: mod_base = OTHER; note = thymine
  modified_base 489: mod_base = OTHER; note = thymine
  modified_base 492: mod_base = OTHER; note = thymine
  modified_base 495: mod_base = OTHER; note = thymine
  modified_base 498: mod_base = OTHER; note = thymine
  modified_base 501: mod_base = OTHER; note = thymine
  modified_base 504: mod_base = OTHER; note = thymine
  modified_base 506..507: mod_base = OTHER; note = thymine
  modified_base 513: mod_base = OTHER; note = thymine
  modified_base 516: mod_base = OTHER; note = thymine
  modified_base 519..522: mod_base = OTHER; note = thymine
  modified_base 525: mod_base = OTHER; note = thymine
  modified_base 528: mod_base = OTHER; note = thymine
  modified_base 531: mod_base = OTHER; note = thymine
  modified_base 534: mod_base = OTHER; note = thymine
  modified_base 539..540: mod_base = OTHER; note = thymine
  modified_base 543: mod_base = OTHER; note = thymine
  modified_base 545..546: mod_base = OTHER; note = thymine
  modified_base 549: mod_base = OTHER; note = thymine
  modified_base 553..555: mod_base = OTHER; note = thymine
  modified_base 565: mod_base = OTHER; note = thymine
  modified_base 567: mod_base = OTHER; note = thymine
  modified_base 570: mod_base = OTHER; note = thymine
  modified_base 573: mod_base = OTHER; note = thymine
  modified_base 575..576: mod_base = OTHER; note = thymine
  modified_base 579: mod_base = OTHER; note = thymine
  modified_base 582: mod_base = OTHER; note = thymine
  modified_base 588: mod_base = OTHER; note = thymine
  modified_base 591: mod_base = OTHER; note = thymine
  modified_base 594..595: mod_base = OTHER; note = thymine
  modified_base 597..598: mod_base = OTHER; note = thymine
  modified_base 600: mod_base = OTHER; note = thymine
  modified_base 603: mod_base = OTHER; note = thymine
  modified_base 606..610: mod_base = OTHER; note = thymine
  modified_base 612: mod_base = OTHER; note = thymine
  modified_base 615: mod_base = OTHER; note = thymine
  modified_base 621: mod_base = OTHER; note = thymine
  modified_base 623..624: mod_base = OTHER; note = thymine
  modified_base 630: mod_base = OTHER; note = thymine
  modified_base 635..636: mod_base = OTHER; note = thymine
  modified_base 638..639: mod_base = OTHER; note = thymine
  modified_base 641..642: mod_base = OTHER; note = thymine
  modified_base 644..648: mod_base = OTHER; note = thymine
  modified_base 664..666: mod_base = OTHER; note = thymine
  modified_base 669: mod_base = OTHER; note = thymine
  modified_base 672: mod_base = OTHER; note = thymine
  modified_base 675: mod_base = OTHER; note = thymine
  modified_base 678: mod_base = OTHER; note = thymine
  modified_base 680..682: mod_base = OTHER; note = thymine
  modified_base 684: mod_base = OTHER; note = thymine
  modified_base 687: mod_base = OTHER; note = thymine
  modified_base 690: mod_base = OTHER; note = thymine
  modified_base 692..693: mod_base = OTHER; note = thymine
  modified_base 702: mod_base = OTHER; note = thymine
  modified_base 704..705: mod_base = OTHER; note = thymine
  modified_base 711: mod_base = OTHER; note = thymine
  modified_base 713..714: mod_base = OTHER; note = thymine
  modified_base 716..717: mod_base = OTHER; note = thymine
  modified_base 719: mod_base = OTHER; note = thymine
  modified_base 723: mod_base = OTHER; note = thymine
  modified_base 729: mod_base = OTHER; note = thymine
  modified_base 732: mod_base = OTHER; note = thymine
  modified_base 735: mod_base = OTHER; note = thymine
  modified_base 737..739: mod_base = OTHER; note = thymine
  modified_base 741: mod_base = OTHER; note = thymine
  modified_base 744: mod_base = OTHER; note = thymine
  modified_base 747: mod_base = OTHER; note = thymine
  modified_base 750: mod_base = OTHER; note = thymine
  modified_base 752..753: mod_base = OTHER; note = thymine
  modified_base 761: mod_base = OTHER; note = thymine
  modified_base 764..765: mod_base = OTHER; note = thymine
  modified_base 768: mod_base = OTHER; note = thymine
  modified_base 771..772: mod_base = OTHER; note = thymine
  modified_base 774: mod_base = OTHER; note = thymine
  modified_base 777..780: mod_base = OTHER; note = thymine
  modified_base 786: mod_base = OTHER; note = thymine
  modified_base 789: mod_base = OTHER; note = thymine
  modified_base 795: mod_base = OTHER; note = thymine
  modified_base 801: mod_base = OTHER; note = thymine
  modified_base 804: mod_base = OTHER; note = thymine
  modified_base 810: mod_base = OTHER; note = thymine
  modified_base 813..814: mod_base = OTHER; note = thymine
  modified_base 816: mod_base = OTHER; note = thymine
  modified_base 819: mod_base = OTHER; note = thymine
  modified_base 822: mod_base = OTHER; note = thymine
  modified_base 828..831: mod_base = OTHER; note = thymine
  modified_base 833..835: mod_base = OTHER; note = thymine
  modified_base 839..840: mod_base = OTHER; note = thymine
  modified_base 843: mod_base = OTHER; note = thymine
  modified_base 848..849: mod_base = OTHER; note = thymine
  modified_base 852: mod_base = OTHER; note = thymine
  modified_base 855: mod_base = OTHER; note = thymine
  modified_base 857..858: mod_base = OTHER; note = thymine
  modified_base 861: mod_base = OTHER; note = thymine
  modified_base 863..864: mod_base = OTHER; note = thymine
  modified_base 866..867: mod_base = OTHER; note = thymine
  modified_base 876..877: mod_base = OTHER; note = thymine
  modified_base 879: mod_base = OTHER; note = thymine
  modified_base 885: mod_base = OTHER; note = thymine
  modified_base 888: mod_base = OTHER; note = thymine
  modified_base 890..891: mod_base = OTHER; note = thymine
  modified_base 894: mod_base = OTHER; note = thymine
  modified_base 897: mod_base = OTHER; note = thymine
  modified_base 900: mod_base = OTHER; note = thymine
  modified_base 906: mod_base = OTHER; note = thymine
  modified_base 909: mod_base = OTHER; note = thymine
  modified_base 912: mod_base = OTHER; note = thymine
  modified_base 914..915: mod_base = OTHER; note = thymine
  modified_base 917: mod_base = OTHER; note = thymine
  modified_base 921: mod_base = OTHER; note = thymine
  modified_base 927..928: mod_base = OTHER; note = thymine
  modified_base 930: mod_base = OTHER; note = thymine
  modified_base 933: mod_base = OTHER; note = thymine
  modified_base 937: mod_base = OTHER; note = thymine
  modified_base 939: mod_base = OTHER; note = thymine
  modified_base 944..945: mod_base = OTHER; note = thymine
  modified_base 948..949: mod_base = OTHER; note = thymine
  modified_base 951: mod_base = OTHER; note = thymine
  modified_base 954: mod_base = OTHER; note = thymine
  modified_base 960: mod_base = OTHER; note = thymine
  modified_base 963: mod_base = OTHER; note = thymine
  modified_base 968..969: mod_base = OTHER; note = thymine
  modified_base 971..972: mod_base = OTHER; note = thymine
  modified_base 975: mod_base = OTHER; note = thymine
  modified_base 977..978: mod_base = OTHER; note = thymine
  modified_base 984: mod_base = OTHER; note = thymine
  modified_base 987: mod_base = OTHER; note = thymine
  modified_base 990..996: mod_base = OTHER; note = thymine
  modified_base 1002: mod_base = OTHER; note = thymine
  modified_base 1004..1005: mod_base = OTHER; note = thymine
  modified_base 1008..1009: mod_base = OTHER; note = thymine
  modified_base 1011: mod_base = OTHER; note = thymine
  modified_base 1014: mod_base = OTHER; note = thymine
  modified_base 1020: mod_base = OTHER; note = thymine
  modified_base 1023: mod_base = OTHER; note = thymine
  modified_base 1026: mod_base = OTHER; note = thymine
  modified_base 1032..1033: mod_base = OTHER; note = thymine
  modified_base 1035: mod_base = OTHER; note = thymine
  modified_base 1038: mod_base = OTHER; note = thymine
  modified_base 1040..1041: mod_base = OTHER; note = thymine
  modified_base 1043: mod_base = OTHER; note = thymine
  modified_base 1049: mod_base = OTHER; note = thymine
  modified_base 1056..1057: mod_base = OTHER; note = thymine
  modified_base 1059: mod_base = OTHER; note = thymine
  modified_base 1062: mod_base = OTHER; note = thymine
  modified_base 1065: mod_base = OTHER; note = thymine
  modified_base 1067..1069: mod_base = OTHER; note = thymine
  modified_base 1071: mod_base = OTHER; note = thymine
  modified_base 1074: mod_base = OTHER; note = thymine
  modified_base 1077: mod_base = OTHER; note = thymine
  modified_base 1079..1080: mod_base = OTHER; note = thymine
  modified_base 1092: mod_base = OTHER; note = thymine
  modified_base 1094..1095: mod_base = OTHER; note = thymine
  modified_base 1101: mod_base = OTHER; note = thymine
  modified_base 1108: mod_base = OTHER; note = thymine
  modified_base 1110: mod_base = OTHER; note = thymine
  modified_base 1113: mod_base = OTHER; note = thymine
  modified_base 1115..1116: mod_base = OTHER; note = thymine
  modified_base 1119: mod_base = OTHER; note = thymine
  modified_base 1121..1123: mod_base = OTHER; note = thymine
  modified_base 1125..1126: mod_base = OTHER; note = thymine
  modified_base 1128: mod_base = OTHER; note = thymine
  modified_base 1133..1134: mod_base = OTHER; note = thymine
  modified_base 1140: mod_base = OTHER; note = thymine
  modified_base 1145..1146: mod_base = OTHER; note = thymine
  modified_base 1149: mod_base = OTHER; note = thymine
  modified_base 1152: mod_base = OTHER; note = thymine
  modified_base 1155..1159: mod_base = OTHER; note = thymine
  modified_base 1161: mod_base = OTHER; note = thymine
  modified_base 1163..1167: mod_base = OTHER; note = thymine
  modified_base 1173: mod_base = OTHER; note = thymine
  modified_base 1176: mod_base = OTHER; note = thymine
  modified_base 1182: mod_base = OTHER; note = thymine
  modified_base 1184..1185: mod_base = OTHER; note = thymine
  modified_base 1188: mod_base = OTHER; note = thymine
  modified_base 1191: mod_base = OTHER; note = thymine
  modified_base 1194: mod_base = OTHER; note = thymine
  modified_base 1196..1197: mod_base = OTHER; note = thymine
  modified_base 1203: mod_base = OTHER; note = thymine
  modified_base 1206: mod_base = OTHER; note = thymine
  modified_base 1208..1209: mod_base = OTHER; note = thymine
  modified_base 1215: mod_base = OTHER; note = thymine
  modified_base 1220..1221: mod_base = OTHER; note = thymine
  modified_base 1223..1224: mod_base = OTHER; note = thymine
  modified_base 1230: mod_base = OTHER; note = thymine
  modified_base 1232..1233: mod_base = OTHER; note = thymine
  modified_base 1235..1236: mod_base = OTHER; note = thymine
  modified_base 1242: mod_base = OTHER; note = thymine
  modified_base 1244..1246: mod_base = OTHER; note = thymine
  modified_base 1248..1251: mod_base = OTHER; note = thymine
  modified_base 1254: mod_base = OTHER; note = thymine
  modified_base 1258..1260: mod_base = OTHER; note = thymine
  modified_base 1262..1263: mod_base = OTHER; note = thymine
  modified_base 1268..1270: mod_base = OTHER; note = thymine
  modified_base 1272: mod_base = OTHER; note = thymine
  modified_base 1274..1275: mod_base = OTHER; note = thymine
  modified_base 1281: mod_base = OTHER; note = thymine
  modified_base 1283..1284: mod_base = OTHER; note = thymine
  modified_base 1287: mod_base = OTHER; note = thymine
  modified_base 1290: mod_base = OTHER; note = thymine
  modified_base 1292..1293: mod_base = OTHER; note = thymine
  modified_base 1295..1296: mod_base = OTHER; note = thymine
  modified_base 1299: mod_base = OTHER; note = thymine
  modified_base 1301..1302: mod_base = OTHER; note = thymine
  modified_base 1304: mod_base = OTHER; note = thymine
  modified_base 1314: mod_base = OTHER; note = thymine
  modified_base 1320..1321: mod_base = OTHER; note = thymine
  modified_base 1323: mod_base = OTHER; note = thymine
  modified_base 1326: mod_base = OTHER; note = thymine
  modified_base 1332..1333: mod_base = OTHER; note = thymine
  modified_base 1335: mod_base = OTHER; note = thymine
  modified_base 1338: mod_base = OTHER; note = thymine
  modified_base 1343..1345: mod_base = OTHER; note = thymine
  modified_base 1347: mod_base = OTHER; note = thymine
  modified_base 1350: mod_base = OTHER; note = thymine
  modified_base 1353: mod_base = OTHER; note = thymine
  modified_base 1356..1357: mod_base = OTHER; note = thymine
  modified_base 1359: mod_base = OTHER; note = thymine
  modified_base 1362: mod_base = OTHER; note = thymine
  modified_base 1371: mod_base = OTHER; note = thymine
  modified_base 1374: mod_base = OTHER; note = thymine
  modified_base 1385..1387: mod_base = OTHER; note = thymine
  modified_base 1389: mod_base = OTHER; note = thymine
  modified_base 1391..1392: mod_base = OTHER; note = thymine
  modified_base 1395: mod_base = OTHER; note = thymine
  modified_base 1398: mod_base = OTHER; note = thymine
  modified_base 1400..1401: mod_base = OTHER; note = thymine
  modified_base 1404: mod_base = OTHER; note = thymine
  modified_base 1407: mod_base = OTHER; note = thymine
  modified_base 1410: mod_base = OTHER; note = thymine
  modified_base 1415..1416: mod_base = OTHER; note = thymine
  modified_base 1419: mod_base = OTHER; note = thymine
  modified_base 1422: mod_base = OTHER; note = thymine
  modified_base 1425: mod_base = OTHER; note = thymine
  modified_base 1427..1428: mod_base = OTHER; note = thymine
  modified_base 1430..1431: mod_base = OTHER; note = thymine
  modified_base 1433..1434: mod_base = OTHER; note = thymine
  modified_base 1437: mod_base = OTHER; note = thymine
  modified_base 1440: mod_base = OTHER; note = thymine
  modified_base 1442..1444: mod_base = OTHER; note = thymine
  modified_base 1446: mod_base = OTHER; note = thymine
  modified_base 1452: mod_base = OTHER; note = thymine
  modified_base 1455: mod_base = OTHER; note = thymine
  modified_base 1460..1461: mod_base = OTHER; note = thymine
  modified_base 1463..1464: mod_base = OTHER; note = thymine
  modified_base 1467: mod_base = OTHER; note = thymine
  modified_base 1470: mod_base = OTHER; note = thymine
  modified_base 1472..1473: mod_base = OTHER; note = thymine
  modified_base 1475..1476: mod_base = OTHER; note = thymine
  modified_base 1479: mod_base = OTHER; note = thymine
  modified_base 1482..1483: mod_base = OTHER; note = thymine
  modified_base 1485: mod_base = OTHER; note = thymine
  modified_base 1488..1489: mod_base = OTHER; note = thymine
  modified_base 1491: mod_base = OTHER; note = thymine
  modified_base 1494: mod_base = OTHER; note = thymine
  modified_base 1497: mod_base = OTHER; note = thymine
  modified_base 1500: mod_base = OTHER; note = thymine
  modified_base 1502..1503: mod_base = OTHER; note = thymine
  modified_base 1506: mod_base = OTHER; note = thymine
  modified_base 1508..1509: mod_base = OTHER; note = thymine
  modified_base 1515: mod_base = OTHER; note = thymine
  modified_base 1518: mod_base = OTHER; note = thymine
  modified_base 1521: mod_base = OTHER; note = thymine
  modified_base 1526..1527: mod_base = OTHER; note = thymine
  modified_base 1530: mod_base = OTHER; note = thymine
  modified_base 1534: mod_base = OTHER; note = thymine
  modified_base 1536..1539: mod_base = OTHER; note = thymine
  modified_base 1545: mod_base = OTHER; note = thymine
  modified_base 1548: mod_base = OTHER; note = thymine
  modified_base 1556..1557: mod_base = OTHER; note = thymine
  modified_base 1566: mod_base = OTHER; note = thymine
  modified_base 1578: mod_base = OTHER; note = thymine
  modified_base 1581: mod_base = OTHER; note = thymine
  modified_base 1587: mod_base = OTHER; note = thymine
  modified_base 1590: mod_base = OTHER; note = thymine
  modified_base 1599: mod_base = OTHER; note = thymine
  modified_base 1602: mod_base = OTHER; note = thymine
  modified_base 1605: mod_base = OTHER; note = thymine
  modified_base 1609..1611: mod_base = OTHER; note = thymine
  modified_base 1614: mod_base = OTHER; note = thymine
  modified_base 1618: mod_base = OTHER; note = thymine
  modified_base 1620..1623: mod_base = OTHER; note = thymine
  modified_base 1626: mod_base = OTHER; note = thymine
  modified_base 1629..1632: mod_base = OTHER; note = thymine
  modified_base 1634..1635: mod_base = OTHER; note = thymine
  modified_base 1638: mod_base = OTHER; note = thymine
  modified_base 1644: mod_base = OTHER; note = thymine
  modified_base 1648: mod_base = OTHER; note = thymine
  modified_base 1650: mod_base = OTHER; note = thymine
  modified_base 1656: mod_base = OTHER; note = thymine
  modified_base 1658..1659: mod_base = OTHER; note = thymine
  modified_base 1661..1662: mod_base = OTHER; note = thymine
  modified_base 1667..1668: mod_base = OTHER; note = thymine
  modified_base 1671: mod_base = OTHER; note = thymine
  modified_base 1673..1675: mod_base = OTHER; note = thymine
  modified_base 1677: mod_base = OTHER; note = thymine
  modified_base 1689: mod_base = OTHER; note = thymine
  modified_base 1692: mod_base = OTHER; note = thymine
  modified_base 1696: mod_base = OTHER; note = thymine
  modified_base 1698: mod_base = OTHER; note = thymine
  modified_base 1700..1702: mod_base = OTHER; note = thymine
  modified_base 1704..1705: mod_base = OTHER; note = thymine
  modified_base 1707: mod_base = OTHER; note = thymine
  modified_base 1710: mod_base = OTHER; note = thymine
  modified_base 1718..1719: mod_base = OTHER; note = thymine
  modified_base 1722: mod_base = OTHER; note = thymine
  modified_base 1724..1725: mod_base = OTHER; note = thymine
  modified_base 1727..1728: mod_base = OTHER; note = thymine
  modified_base 1731: mod_base = OTHER; note = thymine
  modified_base 1733..1734: mod_base = OTHER; note = thymine
  modified_base 1737: mod_base = OTHER; note = thymine
  modified_base 1746..1747: mod_base = OTHER; note = thymine
  modified_base 1749: mod_base = OTHER; note = thymine
  modified_base 1751..1752: mod_base = OTHER; note = thymine
  modified_base 1757..1758: mod_base = OTHER; note = thymine
  modified_base 1761: mod_base = OTHER; note = thymine
  modified_base 1764: mod_base = OTHER; note = thymine
  modified_base 1767: mod_base = OTHER; note = thymine
  modified_base 1769..1770: mod_base = OTHER; note = thymine
  modified_base 1773..1777: mod_base = OTHER; note = thymine
  modified_base 1779: mod_base = OTHER; note = thymine
  modified_base 1782: mod_base = OTHER; note = thymine
  modified_base 1785..1786: mod_base = OTHER; note = thymine
  modified_base 1791: mod_base = OTHER; note = thymine
  modified_base 1794..1795: mod_base = OTHER; note = thymine
  modified_base 1797..1800: mod_base = OTHER; note = thymine
  modified_base 1803: mod_base = OTHER; note = thymine
  modified_base 1806: mod_base = OTHER; note = thymine
  modified_base 1811..1812: mod_base = OTHER; note = thymine
  modified_base 1814..1815: mod_base = OTHER; note = thymine
  modified_base 1817..1818: mod_base = OTHER; note = thymine
  modified_base 1820..1821: mod_base = OTHER; note = thymine
  modified_base 1824..1825: mod_base = OTHER; note = thymine
  modified_base 1827: mod_base = OTHER; note = thymine
  modified_base 1833: mod_base = OTHER; note = thymine
  modified_base 1839: mod_base = OTHER; note = thymine
  modified_base 1845: mod_base = OTHER; note = thymine
  modified_base 1848: mod_base = OTHER; note = thymine
  modified_base 1854: mod_base = OTHER; note = thymine
  modified_base 1857..1858: mod_base = OTHER; note = thymine
  modified_base 1860: mod_base = OTHER; note = thymine
  modified_base 1864: mod_base = OTHER; note = thymine
  modified_base 1866..1869: mod_base = OTHER; note = thymine
  modified_base 1872: mod_base = OTHER; note = thymine
  modified_base 1875: mod_base = OTHER; note = thymine
  modified_base 1881: mod_base = OTHER; note = thymine
  modified_base 1884..1885: mod_base = OTHER; note = thymine
  modified_base 1887: mod_base = OTHER; note = thymine
  modified_base 1890: mod_base = OTHER; note = thymine
  modified_base 1894: mod_base = OTHER; note = thymine
  modified_base 1903..1905: mod_base = OTHER; note = thymine
  modified_base 1911: mod_base = OTHER; note = thymine
  modified_base 1914: mod_base = OTHER; note = thymine
  modified_base 1916..1917: mod_base = OTHER; note = thymine
  modified_base 1923..1924: mod_base = OTHER; note = thymine
  modified_base 1926: mod_base = OTHER; note = thymine
  modified_base 1929..1932: mod_base = OTHER; note = thymine
  modified_base 1935: mod_base = OTHER; note = thymine
  modified_base 1938..1939: mod_base = OTHER; note = thymine
  modified_base 1941: mod_base = OTHER; note = thymine
  modified_base 1953: mod_base = OTHER; note = thymine
  modified_base 1955..1956: mod_base = OTHER; note = thymine
  modified_base 1958..1959: mod_base = OTHER; note = thymine
  modified_base 1961..1962: mod_base = OTHER; note = thymine
  modified_base 1969..1971: mod_base = OTHER; note = thymine
  modified_base 1974: mod_base = OTHER; note = thymine
  modified_base 1980: mod_base = OTHER; note = thymine
  modified_base 1983..1986: mod_base = OTHER; note = thymine
  modified_base 1993: mod_base = OTHER; note = thymine
  modified_base 1995: mod_base = OTHER; note = thymine
  modified_base 1998: mod_base = OTHER; note = thymine
  modified_base 2000..2001: mod_base = OTHER; note = thymine
  modified_base 2004: mod_base = OTHER; note = thymine
  modified_base 2007: mod_base = OTHER; note = thymine
  modified_base 2010: mod_base = OTHER; note = thymine
  modified_base 2013..2014: mod_base = OTHER; note = thymine
  modified_base 2016: mod_base = OTHER; note = thymine
  modified_base 2018..2019: mod_base = OTHER; note = thymine
  modified_base 2022: mod_base = OTHER; note = thymine
  modified_base 2025..2028: mod_base = OTHER; note = thymine
  modified_base 2030..2032: mod_base = OTHER; note = thymine
  modified_base 2034: mod_base = OTHER; note = thymine
  modified_base 2038..2040: mod_base = OTHER; note = thymine
  modified_base 2042..2043: mod_base = OTHER; note = thymine
  modified_base 2046: mod_base = OTHER; note = thymine
  modified_base 2049: mod_base = OTHER; note = thymine
  modified_base 2052: mod_base = OTHER; note = thymine
  modified_base 2054..2055: mod_base = OTHER; note = thymine
  modified_base 2057..2058: mod_base = OTHER; note = thymine
  modified_base 2060..2061: mod_base = OTHER; note = thymine
  modified_base 2064: mod_base = OTHER; note = thymine
  modified_base 2067: mod_base = OTHER; note = thymine
  modified_base 2073: mod_base = OTHER; note = thymine
  modified_base 2079: mod_base = OTHER; note = thymine
  modified_base 2082: mod_base = OTHER; note = thymine
  modified_base 2084..2088: mod_base = OTHER; note = thymine
  modified_base 2091..2092: mod_base = OTHER; note = thymine
  modified_base 2094: mod_base = OTHER; note = thymine
  modified_base 2097: mod_base = OTHER; note = thymine
  modified_base 2100: mod_base = OTHER; note = thymine
  modified_base 2105..2106: mod_base = OTHER; note = thymine
  modified_base 2109: mod_base = OTHER; note = thymine
  modified_base 2112: mod_base = OTHER; note = thymine
  modified_base 2114..2115: mod_base = OTHER; note = thymine
  modified_base 2117..2118: mod_base = OTHER; note = thymine
  modified_base 2121: mod_base = OTHER; note = thymine
  modified_base 2124..2128: mod_base = OTHER; note = thymine
  modified_base 2133: mod_base = OTHER; note = thymine
  modified_base 2135..2136: mod_base = OTHER; note = thymine
  modified_base 2139: mod_base = OTHER; note = thymine
  modified_base 2144..2145: mod_base = OTHER; note = thymine
  modified_base 2148: mod_base = OTHER; note = thymine
  modified_base 2151: mod_base = OTHER; note = thymine
  modified_base 2157: mod_base = OTHER; note = thymine
  modified_base 2160: mod_base = OTHER; note = thymine
  modified_base 2163: mod_base = OTHER; note = thymine
  modified_base 2166: mod_base = OTHER; note = thymine
  modified_base 2169: mod_base = OTHER; note = thymine
  modified_base 2172: mod_base = OTHER; note = thymine
  modified_base 2174..2175: mod_base = OTHER; note = thymine
  modified_base 2178: mod_base = OTHER; note = thymine
  modified_base 2181: mod_base = OTHER; note = thymine
  modified_base 2183..2184: mod_base = OTHER; note = thymine
  modified_base 2186..2187: mod_base = OTHER; note = thymine
  modified_base 2189..2190: mod_base = OTHER; note = thymine
  modified_base 2193..2194: mod_base = OTHER; note = thymine
  modified_base 2196..2197: mod_base = OTHER; note = thymine
  modified_base 2199: mod_base = OTHER; note = thymine
  modified_base 2202: mod_base = OTHER; note = thymine
  modified_base 2204..2205: mod_base = OTHER; note = thymine
  modified_base 2208: mod_base = OTHER; note = thymine
  modified_base 2210: mod_base = OTHER; note = thymine
  modified_base 2222..2223: mod_base = OTHER; note = thymine
  modified_base 2226: mod_base = OTHER; note = thymine
  modified_base 2229..2232: mod_base = OTHER; note = thymine
  modified_base 2234..2235: mod_base = OTHER; note = thymine
  modified_base 2238..2239: mod_base = OTHER; note = thymine
  modified_base 2241: mod_base = OTHER; note = thymine
  modified_base 2249: mod_base = OTHER; note = thymine
  modified_base 2253: mod_base = OTHER; note = thymine
  modified_base 2256..2259: mod_base = OTHER; note = thymine
  modified_base 2262: mod_base = OTHER; note = thymine
  modified_base 2265: mod_base = OTHER; note = thymine
  modified_base 2271: mod_base = OTHER; note = thymine
  modified_base 2273..2274: mod_base = OTHER; note = thymine
  modified_base 2277: mod_base = OTHER; note = thymine
  modified_base 2286: mod_base = OTHER; note = thymine
  modified_base 2289: mod_base = OTHER; note = thymine
  modified_base 2294..2295: mod_base = OTHER; note = thymine
  modified_base 2297..2298: mod_base = OTHER; note = thymine
  modified_base 2301: mod_base = OTHER; note = thymine
  modified_base 2310: mod_base = OTHER; note = thymine
  modified_base 2313..2316: mod_base = OTHER; note = thymine
  modified_base 2319: mod_base = OTHER; note = thymine
  modified_base 2325..2326: mod_base = OTHER; note = thymine
  modified_base 2332..2337: mod_base = OTHER; note = thymine
  modified_base 2340: mod_base = OTHER; note = thymine
  modified_base 2348..2349: mod_base = OTHER; note = thymine
  modified_base 2351: mod_base = OTHER; note = thymine
  modified_base 2354..2355: mod_base = OTHER; note = thymine
  modified_base 2358: mod_base = OTHER; note = thymine
  modified_base 2360..2364: mod_base = OTHER; note = thymine
  modified_base 2367: mod_base = OTHER; note = thymine
  modified_base 2373: mod_base = OTHER; note = thymine
  modified_base 2376: mod_base = OTHER; note = thymine
  modified_base 2379: mod_base = OTHER; note = thymine
  modified_base 2385: mod_base = OTHER; note = thymine
  modified_base 2389..2391: mod_base = OTHER; note = thymine
  modified_base 2400: mod_base = OTHER; note = thymine
  modified_base 2403: mod_base = OTHER; note = thymine
  modified_base 2406: mod_base = OTHER; note = thymine
  modified_base 2409: mod_base = OTHER; note = thymine
  modified_base 2417..2418: mod_base = OTHER; note = thymine
  modified_base 2421: mod_base = OTHER; note = thymine
  modified_base 2424: mod_base = OTHER; note = thymine
  modified_base 2426..2427: mod_base = OTHER; note = thymine
  modified_base 2429..2430: mod_base = OTHER; note = thymine
  modified_base 2433: mod_base = OTHER; note = thymine
  modified_base 2441..2443: mod_base = OTHER; note = thymine
  modified_base 2445..2446: mod_base = OTHER; note = thymine
  modified_base 2448: mod_base = OTHER; note = thymine
  modified_base 2451: mod_base = OTHER; note = thymine
  modified_base 2454: mod_base = OTHER; note = thymine
  modified_base 2460: mod_base = OTHER; note = thymine
  modified_base 2462..2463: mod_base = OTHER; note = thymine
  modified_base 2466: mod_base = OTHER; note = thymine
  modified_base 2470: mod_base = OTHER; note = thymine
  modified_base 2472: mod_base = OTHER; note = thymine
  modified_base 2474..2475: mod_base = OTHER; note = thymine
  modified_base 2478: mod_base = OTHER; note = thymine
  modified_base 2481: mod_base = OTHER; note = thymine
  modified_base 2483..2487: mod_base = OTHER; note = thymine
  modified_base 2489..2491: mod_base = OTHER; note = thymine
  modified_base 2493: mod_base = OTHER; note = thymine
  modified_base 2496: mod_base = OTHER; note = thymine
  modified_base 2499: mod_base = OTHER; note = thymine
  modified_base 2502: mod_base = OTHER; note = thymine
  modified_base 2505: mod_base = OTHER; note = thymine
  modified_base 2508: mod_base = OTHER; note = thymine
  modified_base 2513: mod_base = OTHER; note = thymine
  modified_base 2515: mod_base = OTHER; note = thymine
  modified_base 2517: mod_base = OTHER; note = thymine
  modified_base 2520: mod_base = OTHER; note = thymine
  modified_base 2523: mod_base = OTHER; note = thymine
  modified_base 2526: mod_base = OTHER; note = thymine
  modified_base 2532: mod_base = OTHER; note = thymine
  modified_base 2535: mod_base = OTHER; note = thymine
  modified_base 2537..2538: mod_base = OTHER; note = thymine
  modified_base 2541..2542: mod_base = OTHER; note = thymine
  modified_base 2544: mod_base = OTHER; note = thymine
  modified_base 2547: mod_base = OTHER; note = thymine
  modified_base 2553..2556: mod_base = OTHER; note = thymine
  modified_base 2558..2559: mod_base = OTHER; note = thymine
  modified_base 2565: mod_base = OTHER; note = thymine
  modified_base 2568: mod_base = OTHER; note = thymine
  modified_base 2576..2578: mod_base = OTHER; note = thymine
  modified_base 2580: mod_base = OTHER; note = thymine
  modified_base 2582..2583: mod_base = OTHER; note = thymine
  modified_base 2589: mod_base = OTHER; note = thymine
  modified_base 2591..2593: mod_base = OTHER; note = thymine
  modified_base 2597..2598: mod_base = OTHER; note = thymine
  modified_base 2601: mod_base = OTHER; note = thymine
  modified_base 2606..2607: mod_base = OTHER; note = thymine
  modified_base 2612..2613: mod_base = OTHER; note = thymine
  modified_base 2616: mod_base = OTHER; note = thymine
  modified_base 2619: mod_base = OTHER; note = thymine
  modified_base 2621..2622: mod_base = OTHER; note = thymine
  modified_base 2628: mod_base = OTHER; note = thymine
  modified_base 2630: mod_base = OTHER; note = thymine
  modified_base 2633..2634: mod_base = OTHER; note = thymine
  modified_base 2637..2638: mod_base = OTHER; note = thymine
  modified_base 2640: mod_base = OTHER; note = thymine
  modified_base 2646: mod_base = OTHER; note = thymine
  modified_base 2649: mod_base = OTHER; note = thymine
  modified_base 2652: mod_base = OTHER; note = thymine
  modified_base 2657..2658: mod_base = OTHER; note = thymine
  modified_base 2663..2665: mod_base = OTHER; note = thymine
  modified_base 2667: mod_base = OTHER; note = thymine
  modified_base 2673: mod_base = OTHER; note = thymine
  modified_base 2675..2676: mod_base = OTHER; note = thymine
  modified_base 2682: mod_base = OTHER; note = thymine
  modified_base 2685: mod_base = OTHER; note = thymine
  modified_base 2687..2688: mod_base = OTHER; note = thymine
  modified_base 2694..2695: mod_base = OTHER; note = thymine
  modified_base 2697: mod_base = OTHER; note = thymine
  modified_base 2700: mod_base = OTHER; note = thymine
  modified_base 2703: mod_base = OTHER; note = thymine
  modified_base 2706: mod_base = OTHER; note = thymine
  modified_base 2709: mod_base = OTHER; note = thymine
  modified_base 2718..2721: mod_base = OTHER; note = thymine
  modified_base 2724: mod_base = OTHER; note = thymine
  modified_base 2727: mod_base = OTHER; note = thymine
  modified_base 2733: mod_base = OTHER; note = thymine
  modified_base 2736: mod_base = OTHER; note = thymine
  modified_base 2739..2743: mod_base = OTHER; note = thymine
  modified_base 2745: mod_base = OTHER; note = thymine
  modified_base 2754: mod_base = OTHER; note = thymine
  modified_base 2757: mod_base = OTHER; note = thymine
  modified_base 2762..2763: mod_base = OTHER; note = thymine
  modified_base 2765..2766: mod_base = OTHER; note = thymine
  modified_base 2772: mod_base = OTHER; note = thymine
  modified_base 2774..2775: mod_base = OTHER; note = thymine
  modified_base 2778: mod_base = OTHER; note = thymine
  modified_base 2780..2781: mod_base = OTHER; note = thymine
  modified_base 2790: mod_base = OTHER; note = thymine
  modified_base 2797: mod_base = OTHER; note = thymine
  modified_base 2799: mod_base = OTHER; note = thymine
  modified_base 2802: mod_base = OTHER; note = thymine
  modified_base 2804..2805: mod_base = OTHER; note = thymine
  modified_base 2807..2808: mod_base = OTHER; note = thymine
  modified_base 2810..2811: mod_base = OTHER; note = thymine
  modified_base 2814: mod_base = OTHER; note = thymine
  modified_base 2823: mod_base = OTHER; note = thymine
  modified_base 2826..2827: mod_base = OTHER; note = thymine
  modified_base 2829: mod_base = OTHER; note = thymine
  modified_base 2832: mod_base = OTHER; note = thymine
  modified_base 2834..2835: mod_base = OTHER; note = thymine
  modified_base 2838: mod_base = OTHER; note = thymine
  modified_base 2841: mod_base = OTHER; note = thymine
  modified_base 2844: mod_base = OTHER; note = thymine
  modified_base 2847: mod_base = OTHER; note = thymine
  modified_base 2850: mod_base = OTHER; note = thymine
  modified_base 2852: mod_base = OTHER; note = thymine
  modified_base 2855..2856: mod_base = OTHER; note = thymine
  modified_base 2859: mod_base = OTHER; note = thymine
  modified_base 2861..2862: mod_base = OTHER; note = thymine
  modified_base 2865: mod_base = OTHER; note = thymine
  modified_base 2867..2872: mod_base = OTHER; note = thymine
  modified_base 2874: mod_base = OTHER; note = thymine
  modified_base 2879..2880: mod_base = OTHER; note = thymine
  modified_base 2883: mod_base = OTHER; note = thymine
  modified_base 2892: mod_base = OTHER; note = thymine
  modified_base 2898: mod_base = OTHER; note = thymine
  modified_base 2902: mod_base = OTHER; note = thymine
  modified_base 2904..2907: mod_base = OTHER; note = thymine
  modified_base 2909..2910: mod_base = OTHER; note = thymine
  modified_base 2912..2913: mod_base = OTHER; note = thymine
  modified_base 2916: mod_base = OTHER; note = thymine
  modified_base 2918..2920: mod_base = OTHER; note = thymine
  modified_base 2922: mod_base = OTHER; note = thymine
  modified_base 2925..2926: mod_base = OTHER; note = thymine
  modified_base 2933..2934: mod_base = OTHER; note = thymine
  modified_base 2937: mod_base = OTHER; note = thymine
  modified_base 2943: mod_base = OTHER; note = thymine
  modified_base 2945..2946: mod_base = OTHER; note = thymine
  modified_base 2948..2949: mod_base = OTHER; note = thymine
  modified_base 2952: mod_base = OTHER; note = thymine
  modified_base 2955: mod_base = OTHER; note = thymine
  modified_base 2957..2958: mod_base = OTHER; note = thymine
  modified_base 2961..2962: mod_base = OTHER; note = thymine
  modified_base 2964: mod_base = OTHER; note = thymine
  modified_base 2970..2971: mod_base = OTHER; note = thymine
  modified_base 2973: mod_base = OTHER; note = thymine
  modified_base 2976: mod_base = OTHER; note = thymine
  modified_base 2978..2979: mod_base = OTHER; note = thymine
  modified_base 2982: mod_base = OTHER; note = thymine
  modified_base 2985..2986: mod_base = OTHER; note = thymine
  modified_base 2988..2989: mod_base = OTHER; note = thymine
  modified_base 2991: mod_base = OTHER; note = thymine
  modified_base 2994..2998: mod_base = OTHER; note = thymine
  modified_base 3000..3004: mod_base = OTHER; note = thymine
  modified_base 3006: mod_base = OTHER; note = thymine
  modified_base 3008..3009: mod_base = OTHER; note = thymine
  modified_base 3012: mod_base = OTHER; note = thymine
  modified_base 3016: mod_base = OTHER; note = thymine
  modified_base 3018: mod_base = OTHER; note = thymine
  modified_base 3021: mod_base = OTHER; note = thymine
  modified_base 3023..3024: mod_base = OTHER; note = thymine
  modified_base 3026..3027: mod_base = OTHER; note = thymine
  modified_base 3030..3033: mod_base = OTHER; note = thymine
  modified_base 3042: mod_base = OTHER; note = thymine
  modified_base 3049: mod_base = OTHER; note = thymine
  modified_base 3051: mod_base = OTHER; note = thymine
  modified_base 3056..3057: mod_base = OTHER; note = thymine
  modified_base 3061..3063: mod_base = OTHER; note = thymine
  modified_base 3066..3067: mod_base = OTHER; note = thymine
  modified_base 3069..3070: mod_base = OTHER; note = thymine
  modified_base 3072: mod_base = OTHER; note = thymine
  modified_base 3074..3075: mod_base = OTHER; note = thymine
  modified_base 3078..3079: mod_base = OTHER; note = thymine
  modified_base 3081: mod_base = OTHER; note = thymine
  modified_base 3084..3085: mod_base = OTHER; note = thymine
  modified_base 3087..3088: mod_base = OTHER; note = thymine
  modified_base 3090: mod_base = OTHER; note = thymine
  modified_base 3093: mod_base = OTHER; note = thymine
  modified_base 3096: mod_base = OTHER; note = thymine
  modified_base 3099..3103: mod_base = OTHER; note = thymine
  modified_base 3105: mod_base = OTHER; note = thymine
  modified_base 3107..3108: mod_base = OTHER; note = thymine
  modified_base 3111..3112: mod_base = OTHER; note = thymine
  modified_base 3117: mod_base = OTHER; note = thymine
  modified_base 3120: mod_base = OTHER; note = thymine
  modified_base 3126..3127: mod_base = OTHER; note = thymine
  modified_base 3129: mod_base = OTHER; note = thymine
  modified_base 3142..3144: mod_base = OTHER; note = thymine
  modified_base 3147: mod_base = OTHER; note = thymine
  modified_base 3149..3151: mod_base = OTHER; note = thymine
  modified_base 3153: mod_base = OTHER; note = thymine
  modified_base 3156: mod_base = OTHER; note = thymine
  modified_base 3162: mod_base = OTHER; note = thymine
  modified_base 3164..3165: mod_base = OTHER; note = thymine
  modified_base 3167..3168: mod_base = OTHER; note = thymine
  modified_base 3170..3171: mod_base = OTHER; note = thymine
  modified_base 3173..3174: mod_base = OTHER; note = thymine
  modified_base 3181: mod_base = OTHER; note = thymine
  modified_base 3183: mod_base = OTHER; note = thymine
  modified_base 3188..3189: mod_base = OTHER; note = thymine
  modified_base 3192: mod_base = OTHER; note = thymine
  modified_base 3197..3198: mod_base = OTHER; note = thymine
  modified_base 3201: mod_base = OTHER; note = thymine
  modified_base 3209..3210: mod_base = OTHER; note = thymine
  modified_base 3213: mod_base = OTHER; note = thymine
  modified_base 3216..3217: mod_base = OTHER; note = thymine
  modified_base 3219: mod_base = OTHER; note = thymine
  modified_base 3222: mod_base = OTHER; note = thymine
  modified_base 3224..3225: mod_base = OTHER; note = thymine
  modified_base 3234: mod_base = OTHER; note = thymine
  modified_base 3237: mod_base = OTHER; note = thymine
  modified_base 3240: mod_base = OTHER; note = thymine
  modified_base 3242..3243: mod_base = OTHER; note = thymine
  modified_base 3246: mod_base = OTHER; note = thymine
  misc_feature 1..3249: note = Synthetic
  source 1..3249: mol_type = other RNA
atggctgcttttaagcctaatcctattaattatattcttggtcttgctattggtattgcttctgttggttgggctatggttgagattgatgaggaggagaatcctattcgtcttattgatcttggtgttcgtgtttttgagcgtgctgaggttcctaagactggtgattctcttgctatggctcgtcgtcttgctcgttctgttcgtcgtcttactcgtcgtcgtgctcatcgtcttcttcgtgctcgtcgtcttcttaagcgtgagggtgttcttcaggctgctgattttgatgagaatggtcttattaagtctcttcctaatactccttggcagcttcgtgctgctgctcttgatcgtaagcttactcctcttgagtggtctgctgttcttcttcatcttattaagcatcgtggttatctttctcagcgtaagaatgagggtgagactgctgataaggagcttggtgctcttcttaagggtgttgctaataatgctcatgctcttcagactggtgattttcgtactcctgctgagcttgctcttaataagtttgagaaggagtctggtcatattcgtaatcagcgtggtgattattctcatactttttctcgtaaggatcttcaggctgagcttattcttctttttgagaagcagaaggagtttggtaatcctcatgtttctggtggtcttaaggagggtattgagactcttcttatgactcagcgtcctgctctttctggtgatgctgttcagaagatgcttggtcattgtacttttgagcctgctgagcctaaggctgctaagaatacttatactgctgagcgttttatttggcttactaagcttaataatcttcgtattcttgagcagggttctgagcgtcctcttactgatactgagcgtgctactcttatggatgagccttatcgtaagtctaagcttacttatgctcaggctcgtaagcttcttggtcttgaggatactgctttttttaagggtcttcgttatggtaaggataatgctgaggcttctactcttatggagatgaaggcttatcatgctatttctcgtgctcttgagaaggagggtcttaaggataagaagtctcctcttaatctttcttctgagcttcaggatgagattggtactgctttttctctttttaagactgatgaggatattactggtcgtcttaaggatcgtgttcagcctgagattcttgaggctcttcttaagcatatttcttttgataagtttgttcagatttctcttaaggctcttcgtcgtattgttcctcttatggagcagggtaagcgttatgatgaggcttgtgctgagatttatggtgatcattatggtaagaagaatactgaggagaagatttatcttcctcctattcctgctgatgagattcgtaatcctgttgttcttcgtgctctttctcaggctcgtaaggttattaatggtgttgttcgtcgttatggttctcctgctcgtattcatattgagactgctcgtgaggttggtaagtcttttaaggatcgtaaggagattgagaagcgtcaggaggagaatcgtaaggatcgtgagaaggctgctgctaagtttcgtgagtattttcctaattttgttggtgagcctaagtctaaggatattcttaagcttcgtctttatgagcagcagcatggtaagtgtctttattctggtaaggagattaatcttgttcgtcttaatgagaagggttatgttgagattgatcatgctcttcctttttctcgtacttgggatgattcttttaataataaggttcttgttcttggttctgagaatcagaataagggtaatcagactccttatgagtattttaatggtaaggataattctcgtgagtggcaggagtttaaggctcgtgttgagacttctcgttttcctcgttctaagaagcagcgtattcttcttcagaagtttgatgaggatggttttaaggagtgtaatcttaatgatactcgttatgttaatcgttttctttgtcagtttgttgctgatcatattcttcttactggtaagggtaagcgtcgtgtttttgcttctaatggtcagattactaatcttcttcgtggtttttggggtcttcgtaaggttcgtgctgagaatgatcgtcatcatgctcttgatgctgttgttgttgcttgttctactgttgctatgcagcagaagattactcgttttgttcgttataaggagatgaatgcttttgatggtaagactattgataaggagactggtaaggttcttcatcagaagactcattttcctcagccttgggagttttttgctcaggaggttatgattcgtgtttttggtaagcctgatggtaagcctgagtttgaggaggctgatactcctgagaagcttcgtactcttcttgctgagaagctttcttctcgtcctgaggctgttcatgagtatgttactcctctttttgtttctcgtgctcctaatcgtaagatgtctggtgctcataaggatactcttcgttctgctaagcgttttgttaagcataatgagaagatttctgttaagcgtgtttggcttactgagattaagcttgctgatcttgagaatatggttaattataagaatggtcgtgagattgagctttatgaggctcttaaggctcgtcttgaggcttatggtggtaatgctaagcaggcttttgatcctaaggataatcctttttataagaagggtggtcagcttgttaaggctgttcgtgttgagaagactcaggagtctggtgttcttcttaataagaagaatgcttatactattgctgataatggtgatatggttcgtgttgatgttttttgtaaggttgataagaagggtaagaatcagtattttattgttcctatttatgcttggcaggttgctgagaatattcttcctgatattgattgtaagggttatcgtattgatgattcttatactttttgtttttctcttcataagtatgatcttattgcttttcagaaggatgagaagtctaaggttgagtttgcttattatattaattgtgattcttctaatggtcgtttttatcttgcttggcatgataagggttctaaggagcagcagtttcgtatttctactcagaatcttgttcttattcagaagtatcaggttaatgagcttggtaaggagattcgtccttgtcgtcttaagaagcgtcctcctgttcgttga

SEQ ID NO: 267 - RNA, 3249 nt, synthetic construct
  modified_base 2: mod_base = OTHER; note = thymine
  modified_base 10..11: mod_base = OTHER; note = thymine
  modified_base 26: mod_base = OTHER; note = thymine
  modified_base 31: mod_base = OTHER; note = thymine
  modified_base 35: mod_base = OTHER; note = thymine
  modified_base 38: mod_base = OTHER; note = thymine
  modified_base 44: mod_base = OTHER; note = thymine
  modified_base 50: mod_base = OTHER; note = thymine
  modified_base 56: mod_base = OTHER; note = thymine
  modified_base 61: mod_base = OTHER; note = thymine
  modified_base 65: mod_base = OTHER; note = thymine
  modified_base 70: mod_base = OTHER; note = thymine
  modified_base 77: mod_base = OTHER; note = thymine
  modified_base 80: mod_base = OTHER; note = thymine
  modified_base 86: mod_base = OTHER; note = thymine
  modified_base 107: mod_base = OTHER; note = thymine
  modified_base 113: mod_base = OTHER; note = thymine
  modified_base 116: mod_base = OTHER; note = thymine
  modified_base 122: mod_base = OTHER; note = thymine
  modified_base 128: mod_base = OTHER; note = thymine
  modified_base 134: mod_base = OTHER; note = thymine
  modified_base 136..137: mod_base = OTHER; note = thymine
  modified_base 152: mod_base = OTHER; note = thymine
  modified_base 169: mod_base = OTHER; note = thymine
  modified_base 173: mod_base = OTHER; note = thymine
  modified_base 179: mod_base = OTHER; note = thymine
  modified_base 191: mod_base = OTHER; note = thymine
  modified_base 199: mod_base = OTHER; note = thymine
  modified_base 203: mod_base = OTHER; note = thymine
  modified_base 212: mod_base = OTHER; note = thymine
  modified_base 236: mod_base = OTHER; note = thymine
  modified_base 239: mod_base = OTHER; note = thymine
  modified_base 254: mod_base = OTHER; note = thymine
  modified_base 257: mod_base = OTHER; note = thymine
  modified_base 272: mod_base = OTHER; note = thymine
  modified_base 275: mod_base = OTHER; note = thymine
  modified_base 289..290: mod_base = OTHER; note = thymine
  modified_base 305: mod_base = OTHER; note = thymine
  modified_base 308: mod_base = OTHER; note = thymine
  modified_base 313: mod_base = OTHER; note = thymine
  modified_base 317: mod_base = OTHER; note = thymine
  modified_base 331: mod_base = OTHER; note = thymine
  modified_base 338: mod_base = OTHER; note = thymine
  modified_base 353: mod_base = OTHER; note = thymine
  modified_base 365: mod_base = OTHER; note = thymine
  modified_base 374: mod_base = OTHER; note = thymine
  modified_base 379: mod_base = OTHER; note = thymine
  modified_base 382: mod_base = OTHER; note = thymine
  modified_base 389: mod_base = OTHER; note = thymine
  modified_base 392: mod_base = OTHER; note = thymine
  modified_base 395: mod_base = OTHER; note = thymine
  modified_base 401: mod_base = OTHER; note = thymine
  modified_base 404: mod_base = OTHER; note = thymine
  modified_base 418: mod_base = OTHER; note = thymine
  modified_base 422: mod_base = OTHER; note = thymine
  modified_base 424: mod_base = OTHER; note = thymine
  modified_base 464: mod_base = OTHER; note = thymine
  modified_base 473: mod_base = OTHER; note = thymine
  modified_base 476: mod_base = OTHER; note = thymine
  modified_base 485: mod_base = OTHER; note = thymine
  modified_base 506: mod_base = OTHER; note = thymine
  modified_base 520..521: mod_base = OTHER; note = thymine
  modified_base 539: mod_base = OTHER; note = thymine
  modified_base 545: mod_base = OTHER; note = thymine
  modified_base 553..554: mod_base = OTHER; note = thymine
  modified_base 565: mod_base = OTHER; note = thymine
  modified_base 575: mod_base = OTHER; note = thymine
  modified_base 595: mod_base = OTHER; note = thymine
  modified_base 598: mod_base = OTHER; note = thymine
  modified_base 607..608: mod_base = OTHER; note = thymine
  modified_base 610: mod_base = OTHER; note = thymine
  modified_base 623: mod_base = OTHER; note = thymine
  modified_base 635: mod_base = OTHER; note = thymine
  modified_base 638: mod_base = OTHER; note = thymine
  modified_base 641: mod_base = OTHER; note = thymine
  modified_base 644: mod_base = OTHER; note = thymine
  modified_base 646..647: mod_base = OTHER; note = thymine
  modified_base 664..665: mod_base = OTHER; note = thymine
  modified_base 680: mod_base = OTHER; note = thymine
  modified_base 682: mod_base = OTHER; note = thymine
  modified_base 692: mod_base = OTHER; note = thymine
  modified_base 704: mod_base = OTHER; note = thymine
  modified_base 713: mod_base = OTHER; note = thymine
  modified_base 716: mod_base = OTHER; note = thymine
  modified_base 719: mod_base = OTHER; note = thymine
  modified_base 737: mod_base = OTHER; note = thymine
  modified_base 739: mod_base = OTHER; note = thymine
  modified_base 752: mod_base = OTHER; note = thymine
  modified_base 761: mod_base = OTHER; note = thymine
  modified_base 764: mod_base = OTHER; note = thymine
  modified_base 772: mod_base = OTHER; note = thymine
  modified_base 778..779: mod_base = OTHER; note = thymine
  modified_base 814: mod_base = OTHER; note = thymine
  modified_base 829..830: mod_base = OTHER; note = thymine
  modified_base 833: mod_base = OTHER; note = thymine
  modified_base 835: mod_base = OTHER; note = thymine
  modified_base 839: mod_base = OTHER; note = thymine
  modified_base 848: mod_base = OTHER; note = thymine
  modified_base 857: mod_base = OTHER; note = thymine
  modified_base 863: mod_base = OTHER; note = thymine
  modified_base 866: mod_base = OTHER; note = thymine
  modified_base 877: mod_base = OTHER; note = thymine
  modified_base 890: mod_base = OTHER; note = thymine
  modified_base 914: mod_base = OTHER; note = thymine
  modified_base 917: mod_base = OTHER; note = thymine
  modified_base 928: mod_base = OTHER; note = thymine
  modified_base 937: mod_base = OTHER; note = thymine
  modified_base 944: mod_base = OTHER; note = thymine
  modified_base 949: mod_base = OTHER; note = thymine
  modified_base 968: mod_base = OTHER; note = thymine
  modified_base 971: mod_base = OTHER; note = thymine
  modified_base 977: mod_base = OTHER; note = thymine
  modified_base 991..992: mod_base = OTHER; note = thymine
  modified_base 994..995: mod_base = OTHER; note = thymine
  modified_base 1004: mod_base = OTHER; note = thymine
  modified_base 1009: mod_base = OTHER; note = thymine
  modified_base 1033: mod_base = OTHER; note = thymine
  modified_base 1040: mod_base = OTHER; note = thymine
  modified_base 1043: mod_base = OTHER; note = thymine
  modified_base 1049: mod_base = OTHER; note = thymine
  modified_base 1057: mod_base = OTHER; note = thymine
  modified_base 1067: mod_base = OTHER; note = thymine
  modified_base 1069: mod_base = OTHER; note = thymine
  modified_base 1079: mod_base = OTHER; note = thymine
  modified_base 1094: mod_base = OTHER; note = thymine
  modified_base 1108: mod_base = OTHER; note = thymine
  modified_base 1115: mod_base = OTHER; note = thymine
  modified_base 1121: mod_base = OTHER; note = thymine
  modified_base 1123: mod_base = OTHER; note = thymine
  modified_base 1126: mod_base = OTHER; note = thymine
  modified_base 1133: mod_base = OTHER; note = thymine
  modified_base 1145: mod_base = OTHER; note = thymine
  modified_base 1156..1157: mod_base = OTHER; note = thymine
  modified_base 1159: mod_base = OTHER; note = thymine
  modified_base 1163: mod_base = OTHER; note = thymine
  modified_base 1165..1166: mod_base = OTHER; note = thymine
  modified_base 1184: mod_base = OTHER; note = thymine
  modified_base 1196: mod_base = OTHER; note = thymine
  modified_base 1208: mod_base = OTHER; note = thymine
  modified_base 1220: mod_base = OTHER; note = thymine
  modified_base 1223: mod_base = OTHER; note = thymine
  modified_base 1232: mod_base = OTHER; note = thymine
  modified_base 1235: mod_base = OTHER; note = thymine
  modified_base 1244: mod_base = OTHER; note = thymine
  modified_base 1246: mod_base = OTHER; note = thymine
  modified_base 1249..1250: mod_base = OTHER; note = thymine
  modified_base 1258..1259: mod_base = OTHER; note = thymine
  modified_base 1262: mod_base = OTHER; note = thymine
  modified_base 1268: mod_base = OTHER; note = thymine
  modified_base 1270: mod_base = OTHER; note = thymine
  modified_base 1274: mod_base = OTHER; note = thymine
  modified_base 1283: mod_base = OTHER; note = thymine
  modified_base 1292: mod_base = OTHER; note = thymine
  modified_base 1295: mod_base = OTHER; note = thymine
  modified_base 1301: mod_base = OTHER; note = thymine
  modified_base 1304: mod_base = OTHER; note = thymine
  modified_base 1321: mod_base = OTHER; note = thymine
  modified_base 1333: mod_base = OTHER; note = thymine
  modified_base 1343: mod_base = OTHER; note = thymine
  modified_base 1345: mod_base = OTHER; note = thymine
  modified_base 1357: mod_base = OTHER; note = thymine
  modified_base 1385: mod_base = OTHER; note = thymine
  modified_base 1387: mod_base = OTHER; note = thymine
  modified_base 1391: mod_base = OTHER; note = thymine
  modified_base 1400: mod_base = OTHER; note = thymine
  modified_base 1415: mod_base = OTHER; note = thymine
  modified_base 1427: mod_base = OTHER; note = thymine
  modified_base 1430: mod_base = OTHER; note = thymine
  modified_base 1433: mod_base = OTHER; note = thymine
  modified_base 1442: mod_base = OTHER; note = thymine
  modified_base 1444: mod_base = OTHER; note = thymine
  modified_base 1460: mod_base = OTHER; note = thymine
  modified_base 1463: mod_base = OTHER; note = thymine
  modified_base 1472: mod_base = OTHER; note = thymine
  modified_base 1475: mod_base = OTHER; note = thymine
  modified_base 1483: mod_base = OTHER; note = thymine
  modified_base 1489: mod_base = OTHER; note = thymine
  modified_base 1502: mod_base = OTHER; note = thymine
  modified_base 1508: mod_base = OTHER; note = thymine
  modified_base 1526: mod_base = OTHER; note = thymine
  modified_base 1534: mod_base = OTHER; note = thymine
  modified_base 1537..1538: mod_base = OTHER; note = thymine
  modified_base 1556: mod_base = OTHER; note = thymine
  modified_base 1609..1610: mod_base = OTHER; note = thymine
  modified_base 1618: mod_base = OTHER; note = thymine
  modified_base 1621..1622: mod_base = OTHER; note = thymine
  modified_base 1630..1631: mod_base = OTHER; note = thymine
  modified_base 1634: mod_base = OTHER; note = thymine
  modified_base 1648: mod_base = OTHER; note = thymine
  modified_base 1658: mod_base = OTHER; note = thymine
  modified_base 1661: mod_base = OTHER; note = thymine
  modified_base 1667: mod_base = OTHER; note = thymine
  modified_base 1673: mod_base = OTHER; note = thymine
  modified_base 1675: mod_base = OTHER; note = thymine
  modified_base 1696: mod_base = OTHER; note = thymine
  modified_base 1700: mod_base = OTHER; note = thymine
  modified_base 1702: mod_base = OTHER; note = thymine
  modified_base 1705: mod_base = OTHER; note = thymine
  modified_base 1718: mod_base = OTHER; note = thymine
  modified_base 1724: mod_base = OTHER; note = thymine
  modified_base 1727: mod_base = OTHER; note = thymine
  modified_base 1733: mod_base = OTHER; note = thymine
  modified_base 1747: mod_base = OTHER; note = thymine
  modified_base 1751: mod_base = OTHER; note = thymine
  modified_base 1757: mod_base = OTHER; note = thymine
  modified_base 1769: mod_base = OTHER; note = thymine
  modified_base 1774..1775: mod_base = OTHER; note = thymine
  modified_base 1777: mod_base = OTHER; note = thymine
  modified_base 1786: mod_base = OTHER; note = thymine
  modified_base 1795: mod_base = OTHER; note = thymine
  modified_base 1798..1799: mod_base = OTHER; note = thymine
  modified_base 1811: mod_base = OTHER; note = thymine
  modified_base 1814: mod_base = OTHER; note = thymine
  modified_base 1817: mod_base = OTHER; note = thymine
  modified_base 1820: mod_base = OTHER; note = thymine
  modified_base 1825: mod_base = OTHER; note = thymine
  modified_base 1858: mod_base = OTHER; note = thymine
  modified_base 1864: mod_base = OTHER; note = thymine
  modified_base 1867..1868: mod_base = OTHER; note = thymine
  modified_base 1885: mod_base = OTHER; note = thymine
  modified_base 1894: mod_base = OTHER; note = thymine
  modified_base 1903..1904: mod_base = OTHER; note = thymine
  modified_base 1916: mod_base = OTHER; note = thymine
  modified_base 1924: mod_base = OTHER; note = thymine
  modified_base 1930..1931: mod_base = OTHER; note = thymine
  modified_base 1939: mod_base = OTHER; note = thymine
  modified_base 1955: mod_base = OTHER; note = thymine
  modified_base 1958: mod_base = OTHER; note = thymine
  modified_base 1961: mod_base = OTHER; note = thymine
  modified_base 1969..1970: mod_base = OTHER; note = thymine
  modified_base 1984..1985: mod_base = OTHER; note = thymine
  modified_base 1993: mod_base = OTHER; note = thymine
  modified_base 2000: mod_base = OTHER; note = thymine
  modified_base 2014: mod_base = OTHER; note = thymine
  modified_base 2018: mod_base = OTHER; note = thymine
  modified_base 2026..2027: mod_base = OTHER; note = thymine
  modified_base 2030: mod_base = OTHER; note = thymine
  modified_base 2032: mod_base = OTHER; note = thymine
  modified_base 2038..2039: mod_base = OTHER; note = thymine
  modified_base 2042: mod_base = OTHER; note = thymine
  modified_base 2054: mod_base = OTHER; note = thymine
  modified_base 2057: mod_base = OTHER; note = thymine
  modified_base 2060: mod_base = OTHER; note = thymine
  modified_base 2084: mod_base = OTHER; note = thymine
  modified_base 2086..2087: mod_base = OTHER; note = thymine
  modified_base 2092: mod_base = OTHER; note = thymine
  modified_base 2105: mod_base = OTHER; note = thymine
  modified_base 2114: mod_base = OTHER; note = thymine
  modified_base 2117: mod_base = OTHER; note = thymine
  modified_base 2125..2126: mod_base = OTHER; note = thymine
  modified_base 2128: mod_base = OTHER; note = thymine
  modified_base 2135: mod_base = OTHER; note = thymine
  modified_base 2144: mod_base = OTHER; note = thymine
  modified_base 2174: mod_base = OTHER; note = thymine
  modified_base 2183: mod_base = OTHER; note = thymine
  modified_base 2186: mod_base = OTHER; note = thymine
  modified_base 2189: mod_base = OTHER; note = thymine
  modified_base 2194: mod_base = OTHER; note = thymine
  modified_base 2197: mod_base = OTHER; note = thymine
  modified_base 2204: mod_base = OTHER; note = thymine
  modified_base 2210: mod_base = OTHER; note = thymine
  modified_base 2222: mod_base = OTHER; note = thymine
  modified_base 2230..2231: mod_base = OTHER; note = thymine
  modified_base 2234: mod_base = OTHER; note = thymine
  modified_base 2239: mod_base = OTHER; note = thymine
  modified_base 2249: mod_base = OTHER; note = thymine
  modified_base 2257..2258: mod_base = OTHER; note = thymine
  modified_base 2273: mod_base = OTHER; note = thymine
  modified_base 2294: mod_base = OTHER; note = thymine
  modified_base 2297: mod_base = OTHER; note = thymine
  modified_base 2314..2315: mod_base = OTHER; note = thymine
  modified_base 2326: mod_base = OTHER; note = thymine
  modified_base 2332..2333: mod_base = OTHER; note = thymine
  modified_base 2335..2336: mod_base = OTHER; note = thymine
  modified_base 2348: mod_base = OTHER; note = thymine
  modified_base 2351: mod_base = OTHER; note = thymine
  modified_base 2354: mod_base = OTHER; note = thymine
  modified_base 2360: mod_base = OTHER; note = thymine
  modified_base 2362..2363: mod_base = OTHER; note = thymine
  modified_base 2389..2390: mod_base = OTHER; note = thymine
  modified_base 2417: mod_base = OTHER; note = thymine
  modified_base 2426: mod_base = OTHER; note = thymine
  modified_base 2429: mod_base = OTHER; note = thymine
  modified_base 2441: mod_base = OTHER; note = thymine
  modified_base 2443: mod_base = OTHER; note = thymine
  modified_base 2446: mod_base = OTHER; note = thymine
  modified_base 2462: mod_base = OTHER; note = thymine
  modified_base 2470: mod_base = OTHER; note = thymine
  modified_base 2474: mod_base = OTHER; note = thymine
  modified_base 2483: mod_base = OTHER; note = thymine
  modified_base 2485..2486: mod_base = OTHER; note = thymine
  modified_base 2489: mod_base = OTHER; note = thymine
  modified_base 2491: mod_base = OTHER; note = thymine
  modified_base 2513: mod_base = OTHER; note = thymine
  modified_base 2515: mod_base = OTHER; note = thymine
  modified_base 2537: mod_base = OTHER; note = thymine
  modified_base 2542: mod_base = OTHER; note = thymine
  modified_base 2554..2555: mod_base = OTHER; note = thymine
  modified_base 2558: mod_base = OTHER; note = thymine
  modified_base 2576: mod_base = OTHER; note = thymine
  modified_base 2578: mod_base = OTHER; note = thymine
  modified_base 2582: mod_base = OTHER; note = thymine
  modified_base 2591: mod_base = OTHER; note = thymine
  modified_base 2593: mod_base = OTHER; note = thymine
  modified_base 2597: mod_base = OTHER; note = thymine
  modified_base 2606: mod_base = OTHER; note = thymine
  modified_base 2612: mod_base = OTHER; note = thymine
  modified_base 2621: mod_base = OTHER; note = thymine
  modified_base 2630: mod_base = OTHER; note = thymine
  modified_base 2633: mod_base = OTHER; note = thymine
  modified_base 2638: mod_base = OTHER; note = thymine
  modified_base 2657: mod_base = OTHER; note = thymine
  modified_base 2663: mod_base = OTHER; note = thymine
  modified_base 2665: mod_base = OTHER; note = thymine
  modified_base 2675: mod_base = OTHER; note = thymine
  modified_base 2687: mod_base = OTHER; note = thymine
  modified_base 2695: mod_base = OTHER; note = thymine
  modified_base 2719..2720: mod_base = OTHER; note = thymine
  modified_base 2740..2741: mod_base = OTHER; note = thymine
  modified_base 2743: mod_base = OTHER; note = thymine
  modified_base 2762: mod_base = OTHER; note = thymine
  modified_base 2765: mod_base = OTHER; note = thymine
  modified_base 2774: mod_base = OTHER; note = thymine
  modified_base 2780: mod_base = OTHER; note = thymine
  modified_base 2797: mod_base = OTHER; note = thymine
  modified_base 2804: mod_base = OTHER; note = thymine
  modified_base 2807: mod_base = OTHER; note = thymine
  modified_base 2810: mod_base = OTHER; note = thymine
  modified_base 2827: mod_base = OTHER; note = thymine
  modified_base 2834: mod_base = OTHER; note = thymine
  modified_base 2852: mod_base = OTHER; note = thymine
  modified_base 2855: mod_base = OTHER; note = thymine
  modified_base 2861: mod_base = OTHER; note = thymine
  modified_base 2867: mod_base = OTHER; note = thymine
  modified_base 2869..2870: mod_base = OTHER; note = thymine
  modified_base 2872: mod_base = OTHER; note = thymine
  modified_base 2879: mod_base = OTHER; note = thymine
  modified_base 2902: mod_base = OTHER; note = thymine
  modified_base 2905..2906: mod_base = OTHER; note = thymine
  modified_base 2909: mod_base = OTHER; note = thymine
  modified_base 2912: mod_base = OTHER; note = thymine
  modified_base 2918: mod_base = OTHER; note = thymine
  modified_base 2920: mod_base = OTHER; note = thymine
  modified_base 2926: mod_base = OTHER; note = thymine
  modified_base 2933: mod_base = OTHER; note = thymine
  modified_base 2945: mod_base = OTHER; note = thymine
  modified_base 2948: mod_base = OTHER; note = thymine
  modified_base 2957: mod_base = OTHER; note = thymine
  modified_base 2962: mod_base = OTHER; note = thymine
  modified_base 2971: mod_base = OTHER; note = thymine
  modified_base 2978: mod_base = OTHER; note = thymine
  modified_base 2986: mod_base = OTHER; note = thymine
  modified_base 2989: mod_base = OTHER; note = thymine
  modified_base 2995..2996: mod_base = OTHER; note = thymine
  modified_base 2998: mod_base = OTHER; note = thymine
  modified_base 3001..3002: mod_base = OTHER; note = thymine
  modified_base 3004: mod_base = OTHER; note = thymine
  modified_base 3008: mod_base = OTHER; note = thymine
  modified_base 3016: mod_base = OTHER; note = thymine
  modified_base 3023: mod_base = OTHER; note = thymine
  modified_base 3026: mod_base = OTHER; note = thymine
  modified_base 3031..3032: mod_base = OTHER; note = thymine
  modified_base 3049: mod_base = OTHER; note = thymine
  modified_base 3056: mod_base = OTHER; note = thymine
  modified_base 3061..3062: mod_base = OTHER; note = thymine
  modified_base 3067: mod_base = OTHER; note = thymine
  modified_base 3070: mod_base = OTHER; note = thymine
  modified_base 3074: mod_base = OTHER; note = thymine
  modified_base 3079: mod_base = OTHER; note = thymine
  modified_base 3085: mod_base = OTHER; note = thymine
  modified_base 3088: mod_base = OTHER; note = thymine
  modified_base 3100..3101: mod_base = OTHER; note = thymine
  modified_base 3103: mod_base = OTHER; note = thymine
  modified_base 3107: mod_base = OTHER; note = thymine
  modified_base 3112: mod_base = OTHER; note = thymine
  modified_base 3127: mod_base = OTHER; note = thymine
  modified_base 3142..3143: mod_base = OTHER; note = thymine
  modified_base 3149: mod_base = OTHER; note = thymine
  modified_base 3151: mod_base = OTHER; note = thymine
  modified_base 3164: mod_base = OTHER; note = thymine
  modified_base 3167: mod_base = OTHER; note = thymine
  modified_base 3170: mod_base = OTHER; note = thymine
  modified_base 3173: mod_base = OTHER; note = thymine
  modified_base 3181: mod_base = OTHER; note = thymine
  modified_base 3188: mod_base = OTHER; note = thymine
  modified_base 3197: mod_base = OTHER; note = thymine
  modified_base 3209: mod_base = OTHER; note = thymine
  modified_base 3217: mod_base = OTHER; note = thymine
  modified_base 3224: mod_base = OTHER; note = thymine
  modified_base 3242: mod_base = OTHER; note = thymine
  misc_feature 1..3249: note = Synthetic
  source 1..3249: mol_type = other RNA
atggccgccttcaagcccaaccccatcaactacatcctgggcctggccatcggcatcgcctccgtgggctgggccatggtggagatcgacgaggaggagaaccccatccggctgatcgacctgggcgtgcgggtgttcgagcgggccgaggtgcccaagaccggcgactccctggccatggcccggcggctggcccggtccgtgcggcggctgacccggcggcgggcccaccggctgctgcgggcccggcggctgctgaagcgggagggcgtgctgcaggccgccgacttcgacgagaacggcctgatcaagtccctgcccaacaccccctggcagctgcgggccgccgccctggaccggaagctgacccccctggagtggtccgccgtgctgctgcacctgatcaagcaccggggctacctgtcccagcggaagaacgagggcgagaccgccgacaaggagctgggcgccctgctgaagggcgtggccaacaacgcccacgccctgcagaccggcgacttccggacccccgccgagctggccctgaacaagttcgagaaggagtccggccacatccggaaccagcggggcgactactcccacaccttctcccggaaggacctgcaggccgagctgatcctgctgttcgagaagcagaaggagttcggcaacccccacgtgtccggcggcctgaaggagggcatcgagaccctgctgatgacccagcggcccgccctgtccggcgacgccgtgcagaagatgctgggccactgcaccttcgagcccgccgagcccaaggccgccaagaacacctacaccgccgagcggttcatctggctgaccaagctgaacaacctgcggatcctggagcagggctccgagcggcccctgaccgacaccgagcgggccaccctgatggacgagccctaccggaagtccaagctgacctacgcccaggcccggaagctgctgggcctggaggacaccgccttcttcaagggcctgcggtacggcaaggacaacgccgaggcctccaccctgatggagatgaaggcctaccacgccatctcccgggccctggagaaggagggcctgaaggacaagaagtcccccctgaacctgtcctccgagctgcaggacgagatcggcaccgccttctccctgttcaagaccgacgaggacatcaccggccggctgaaggaccgggtgcagcccgagatcctggaggccctgctgaagcacatctccttcgacaagttcgtgcagatctccctgaaggccctgcggcggatcgtgcccctgatggagcagggcaagcggtacgacgaggcctgcgccgagatctacggcgaccactacggcaagaagaacaccgaggagaagatctacctgccccccatccccgccgacgagatccggaaccccgtggtgctgcgggccctgtcccaggcccggaaggtgatcaacggcgtggtgcggcggtacggctcccccgcccggatccacatcgagaccgcccgggaggtgggcaagtccttcaaggaccggaaggagatcgagaagcggcaggaggagaaccggaaggaccgggagaaggccgccgccaagttccgggagtacttccccaacttcgtgggcgagcccaagtccaaggacatcctgaagctgcggctgtacgagcagcagcacggcaagtgcctgtactccggcaaggagatcaacctggtgcggctgaacgagaagggctacgtggagatcgaccacgccctgcccttctcccggacctgggacgactccttcaacaacaaggtgctggtgctgggctccgagaaccagaacaagggcaaccagaccccctacgagtacttcaacggcaaggacaactcccgggagtggcaggagttcaaggcccgggtggagacctcccggttcccccggtccaagaagcagcggatcctgctgcagaagttcgacgaggacggcttcaaggagtgcaacctgaacgacacccggtacgtgaaccggttcctgtgccagttcgtggccgaccacatcctgctgaccggcaagggcaagcggcgggtgttcgcctccaacggccagatcaccaacctgctgcggggcttctggggcctgcggaaggtgcgggccgagaacgaccggcaccacgccctggacgccgtggtggtggcctgctccaccgtggccatgcagcagaagatcacccggttcgtgcggtacaaggagatgaacgccttcgacggcaagaccatcgacaaggagaccggcaaggtgctgcaccagaagacccacttcccccagccctgggagttcttcgcccaggaggtgatgatccgggtgttcggcaagcccgacggcaagcccgagttcgaggaggccgacacccccgagaagctgcggaccctgctggccgagaagctgtcctcccggcccgaggccgtgcacgagtacgtgacccccctgttcgtgtcccgggcccccaaccggaagatgtccggcgcccacaaggacaccctgcggtccgccaagcggttcgtgaagcacaacgagaagatctccgtgaagcgggtgtggctgaccgagatcaagctggccgacctggagaacatggtgaactacaagaacggccgggagatcgagctgtacgaggccctgaaggcccggctggaggcctacggcggcaacgccaagcaggccttcgaccccaaggacaaccccttctacaagaagggcggccagctggtgaaggccgtgcgggtggagaagacccaggagtccggcgtgctgctgaacaagaagaacgcctacaccatcgccgacaacggcgacatggtgcgggtggacgtgttctgcaaggtggacaagaagggcaagaaccagtacttcatcgtgcccatctacgcctggcaggtggccgagaacatcctgcccgacatcgactgcaagggctaccggatcgacgactcctacaccttctgcttctccctgcacaagtacgacctgatcgccttccagaaggacgagaagtccaaggtggagttcgcctactacatcaactgcgactcctccaacggccggttctacctggcctggcacgacaagggctccaaggagcagcagttccggatctccacccagaacctggtgctgatccagaagtaccaggtgaacgagctgggcaaggagatccggccctgccggctgaagaagcggccccccgtgcggtga

SEQ ID NO: 268 - RNA, 3249 nt, synthetic construct
  modified_base 2: mod_base = OTHER; note = thymine
  modified_base 10..11: mod_base = OTHER; note = thymine
  modified_base 26: mod_base = OTHER; note = thymine
  modified_base 31: mod_base = OTHER; note = thymine
  modified_base 35: mod_base = OTHER; note = thymine
  modified_base 38: mod_base = OTHER; note = thymine
  modified_base 44: mod_base = OTHER; note = thymine
  modified_base 50: mod_base = OTHER; note = thymine
  modified_base 56: mod_base = OTHER; note = thymine
  modified_base 61: mod_base = OTHER; note = thymine
  modified_base 65: mod_base = OTHER; note = thymine
  modified_base 70: mod_base = OTHER; note = thymine
  modified_base 77: mod_base = OTHER; note = thymine
  modified_base 80: mod_base = OTHER; note = thymine
  modified_base 86: mod_base = OTHER; note = thymine
  modified_base 107: mod_base = OTHER; note = thymine
  modified_base 113: mod_base = OTHER; note = thymine
  modified_base 116: mod_base = OTHER; note = thymine
  modified_base 122: mod_base = OTHER; note = thymine
  modified_base 128: mod_base = OTHER; note = thymine
  modified_base 134: mod_base = OTHER; note = thymine
  modified_base 136..137: mod_base = OTHER; note = thymine
  modified_base 152: mod_base = OTHER; note = thymine
  modified_base 169: mod_base = OTHER; note = thymine
  modified_base 173: mod_base = OTHER; note = thymine
  modified_base 179: mod_base = OTHER; note = thymine
  modified_base 191: mod_base = OTHER; note = thymine
  modified_base 199: mod_base = OTHER; note = thymine
  modified_base 203: mod_base = OTHER; note = thymine
  modified_base 212: mod_base = OTHER; note = thymine
  modified_base 236: mod_base = OTHER; note = thymine
  modified_base 239: mod_base = OTHER; note = thymine
  modified_base 254: mod_base = OTHER; note = thymine
  modified_base 257: mod_base = OTHER; note = thymine
  modified_base 272: mod_base = OTHER; note = thymine
  modified_base 275: mod_base = OTHER; note = thymine
  modified_base 289..290: mod_base = OTHER; note = thymine
  modified_base 305: mod_base = OTHER; note = thymine
  modified_base 308: mod_base = OTHER; note = thymine
  modified_base 313: mod_base = OTHER; note = thymine
  modified_base 317: mod_base = OTHER; note = thymine
  modified_base 331: mod_base = OTHER; note = thymine
  modified_base 338: mod_base = OTHER; note = thymine
  modified_base 353: mod_base = OTHER; note = thymine
  modified_base 365: mod_base = OTHER; note = thymine
  modified_base 374: mod_base = OTHER; note = thymine
  modified_base 379: mod_base = OTHER; note = thymine
  modified_base 382: mod_base = OTHER; note = thymine
  modified_base 389: mod_base = OTHER; note = thymine
  modified_base 392: mod_base = OTHER; note = thymine
  modified_base 395: mod_base = OTHER; note = thymine
  modified_base 401: mod_base = OTHER; note = thymine
  modified_base 404: mod_base = OTHER; note = thymine
  modified_base 418: mod_base = OTHER; note = thymine
  modified_base 422: mod_base = OTHER; note = thymine
  modified_base 424: mod_base = OTHER; note = thymine
  modified_base 464: mod_base = OTHER; note = thymine
  modified_base 473: mod_base = OTHER; note = thymine
  modified_base 476: mod_base = OTHER; note = thymine
  modified_base 485: mod_base = OTHER; note = thymine
  modified_base 506: mod_base = OTHER; note = thymine
  modified_base 520..521: mod_base = OTHER; note = thymine
  modified_base 539: mod_base = OTHER; note = thymine
  modified_base 545: mod_base = OTHER; note = thymine
  modified_base 553..554: mod_base = OTHER; note = thymine
  modified_base 565: mod_base = OTHER; note = thymine
  modified_base 575: mod_base = OTHER; note = thymine
  modified_base 595: mod_base = OTHER; note = thymine
  modified_base 598: mod_base = OTHER; note = thymine
  modified_base 607..608: mod_base = OTHER; note = thymine
  modified_base 610: mod_base = OTHER; note = thymine
  modified_base 623: mod_base = OTHER; note = thymine
  modified_base 635: mod_base = OTHER; note = thymine
  modified_base 638: mod_base = OTHER; note = thymine
  modified_base 641: mod_base = OTHER; note = thymine
  modified_base 644: mod_base = OTHER; note = thymine
  modified_base 646..647: mod_base = OTHER; note = thymine
  modified_base 664..665: mod_base = OTHER; note = thymine
  modified_base 680: mod_base = OTHER; note = thymine
  modified_base 682: mod_base = OTHER; note = thymine
  modified_base 692: mod_base = OTHER; note = thymine
  modified_base 704: mod_base = OTHER; note = thymine
  modified_base 713: mod_base = OTHER; note = thymine
  modified_base 716: mod_base = OTHER; note = thymine
  modified_base 719: mod_base = OTHER; note = thymine
  modified_base 737: mod_base = OTHER; note = thymine
  modified_base 739: mod_base = OTHER; note = thymine
  modified_base 752: mod_base = OTHER; note = thymine
  modified_base 761: mod_base = OTHER; note = thymine
  modified_base 764: mod_base = OTHER; note = thymine
  modified_base 772: mod_base = OTHER; note = thymine
  modified_base 778..779: mod_base = OTHER; note = thymine
  modified_base 814: mod_base = OTHER; note = thymine
  modified_base 829..830: mod_base = OTHER; note = thymine
  modified_base 833: mod_base = OTHER; note = thymine
  modified_base 835: mod_base = OTHER; note = thymine
  modified_base 839: mod_base = OTHER; note = thymine
  modified_base 848: mod_base = OTHER; note = thymine
  modified_base 857: mod_base = OTHER; note = thymine
  modified_base 863: mod_base = OTHER; note = thymine
  modified_base 866: mod_base = OTHER; note = thymine
  modified_base 877: mod_base = OTHER; note = thymine
  modified_base 890: mod_base = OTHER; note = thymine
  modified_base 914: mod_base = OTHER; note = thymine
  modified_base 917: mod_base = OTHER; note = thymine
  modified_base 928: mod_base = OTHER; note = thymine
  modified_base 937: mod_base = OTHER; note = thymine
  modified_base 944: mod_base = OTHER; note = thymine
  modified_base 949: mod_base = OTHER; note = thymine
  modified_base 968: mod_base = OTHER; note = thymine
  modified_base 971: mod_base = OTHER; note = thymine
  modified_base 977: mod_base = OTHER; note = thymine
  modified_base 991..992: mod_base = OTHER; note = thymine
  modified_base 994..995: mod_base = OTHER; note = thymine
  modified_base 1004: mod_base = OTHER; note = thymine
  modified_base 1009: mod_base = OTHER; note = thymine
  modified_base 1033: mod_base = OTHER; note = thymine
  modified_base 1040: mod_base = OTHER; note = thymine
  modified_base 1043: mod_base = OTHER; note = thymine
  modified_base 1049: mod_base = OTHER; note = thymine
  modified_base 1057: mod_base = OTHER; note = thymine
  modified_base 1067: mod_base = OTHER; note = thymine
  modified_base 1069: mod_base = OTHER; note = thymine
  modified_base 1079: mod_base = OTHER; note = thymine
  modified_base 1094: mod_base = OTHER; note = thymine
  modified_base 1108: mod_base = OTHER; note = thymine
  modified_base 1115: mod_base = OTHER; note = thymine
  modified_base 1121: mod_base = OTHER; note = thymine
  modified_base 1123: mod_base = OTHER; note = thymine
  modified_base 1126: mod_base = OTHER; note = thymine
  modified_base 1133: mod_base = OTHER; note = thymine
  modified_base 1145: mod_base = OTHER; note = thymine
  modified_base 1156..1157: mod_base = OTHER; note = thymine
  modified_base 1159: mod_base = OTHER; note = thymine
  modified_base 1163: mod_base = OTHER; note = thymine
  modified_base 1165..1166: mod_base = OTHER; note = thymine
  modified_base 1184: mod_base = OTHER; note = thymine
  modified_base 1196: mod_base = OTHER; note = thymine
  modified_base 1208: mod_base = OTHER; note = thymine
  modified_base 1220: mod_base = OTHER; note = thymine
  modified_base 1223: mod_base = OTHER; note = thymine
  modified_base 1232: mod_base = OTHER; note = thymine
  modified_base 1235: mod_base = OTHER; note = thymine
  modified_base 1244: mod_base = OTHER; note = thymine
  modified_base 1246: mod_base = OTHER; note = thymine
  modified_base 1249..1250: mod_base = OTHER; note = thymine
  modified_base 1258..1259: mod_base = OTHER; note = thymine
  modified_base 1262: mod_base = OTHER; note = thymine
  modified_base 1268: mod_base = OTHER; note = thymine
  modified_base 1270: mod_base = OTHER; note = thymine
  modified_base 1274: mod_base = OTHER; note = thymine
  modified_base 1283: mod_base = OTHER; note = thymine
  modified_base 1292: mod_base = OTHER; note = thymine
  modified_base 1295: mod_base = OTHER; note = thymine
  modified_base 1301: mod_base = OTHER; note = thymine
  modified_base 1304: mod_base = OTHER; note = thymine
  modified_base 1321: mod_base = OTHER; note = thymine
  modified_base 1333: mod_base = OTHER; note = thymine
  modified_base 1343: mod_base = OTHER; note = thymine
  modified_base 1345: mod_base = OTHER; note = thymine
  modified_base 1357: mod_base = OTHER; note = thymine
  modified_base 1385: mod_base = OTHER; note = thymine
  modified_base 1387: mod_base = OTHER; note = thymine
  modified_base 1391: mod_base = OTHER; note = thymine
  modified_base 1400: mod_base = OTHER; note = thymine
  modified_base 1415: mod_base = OTHER; note = thymine
  modified_base 1427: mod_base = OTHER; note = thymine
  modified_base 1430: mod_base = OTHER; note = thymine
  modified_base 1433: mod_base = OTHER; note = thymine
  modified_base 1442: mod_base = OTHER; note = thymine
  modified_base 1444: mod_base = OTHER; note = thymine
  modified_base 1460: mod_base = OTHER; note = thymine
  modified_base 1463: mod_base = OTHER; note = thymine
  modified_base 1472: mod_base = OTHER; note = thymine
  modified_base 1475: mod_base = OTHER; note = thymine
  modified_base 1483: mod_base = OTHER; note = thymine
  modified_base 1489: mod_base = OTHER; note = thymine
  modified_base 1502: mod_base = OTHER; note = thymine
  modified_base 1508: mod_base = OTHER; note = thymine
  modified_base 1526: mod_base = OTHER; note = thymine
  modified_base 1534: mod_base = OTHER; note = thymine
  modified_base 1537..1538: mod_base = OTHER; note = thymine
  modified_base 1556: mod_base = OTHER; note = thymine
  modified_base 1609..1610: mod_base = OTHER; note = thymine
  modified_base 1618: mod_base = OTHER; note = thymine
  modified_base 1621..1622: mod_base = OTHER; note = thymine
  modified_base 1630..1631: mod_base = OTHER; note = thymine
  modified_base 1634: mod_base = OTHER; note = thymine
  modified_base 1648: mod_base = OTHER; note = thymine
  modified_base 1658: mod_base = OTHER; note = thymine
  modified_base 1661: mod_base = OTHER; note = thymine
  modified_base 1667: mod_base = OTHER; note = thymine
  modified_base 1673: mod_base = OTHER; note = thymine
  modified_base 1675: mod_base = OTHER; note = thymine
  modified_base 1696: mod_base = OTHER; note = thymine
  modified_base 1700: mod_base = OTHER; note = thymine
  modified_base 1702: mod_base = OTHER; note = thymine
  modified_base 1705: mod_base = OTHER; note = thymine
  modified_base 1718: mod_base = OTHER; note = thymine
  modified_base 1724: mod_base = OTHER; note = thymine
  modified_base 1727: mod_base = OTHER; note = thymine
  modified_base 1733: mod_base = OTHER; note = thymine
  modified_base 1747: mod_base = OTHER; note = thymine
  modified_base 1751: mod_base = OTHER; note = thymine
  modified_base 1757: mod_base = OTHER; note = thymine
  modified_base 1769: mod_base = OTHER; note = thymine
  modified_base 1774..1775: mod_base = OTHER; note = thymine
  modified_base 1777: mod_base = OTHER; note = thymine
  modified_base 1786: mod_base = OTHER; note = thymine
  modified_base 1795: mod_base = OTHER; note = thymine
  modified_base 1798..1799: mod_base = OTHER; note = thymine
  modified_base 1811: mod_base = OTHER; note = thymine
  modified_base 1814: mod_base = OTHER; note = thymine
  modified_base 1817: mod_base = OTHER; note = thymine
  modified_base 1820: mod_base = OTHER; note = thymine
  modified_base 1825: mod_base = OTHER; note = thymine
  modified_base 1858: mod_base = OTHER; note = thymine
  modified_base 1864: mod_base = OTHER; note = thymine
  modified_base 1867..1868: mod_base = OTHER; note = thymine
  modified_base 1885: mod_base = OTHER; note = thymine
  modified_base 1894: mod_base = OTHER; note = thymine
  modified_base 1903..1904: mod_base = OTHER; note = thymine
  modified_base 1916: mod_base = OTHER; note = thymine
  modified_base 1924: mod_base = OTHER; note = thymine
  modified_base 1930..1931: mod_base = OTHER; note = thymine
  modified_base 1939: mod_base = OTHER; note = thymine
  modified_base 1955: mod_base = OTHER; note = thymine
  modified_base 1958: mod_base = OTHER; note = thymine
  modified_base 1961: mod_base = OTHER; note = thymine
  modified_base 1969..1970: mod_base = OTHER; note = thymine
  modified_base 1984..1985: mod_base = OTHER; note = thymine
  modified_base 1993: mod_base = OTHER; note = thymine
  modified_base 2000: mod_base = OTHER; note = thymine
  modified_base 2014: mod_base = OTHER; note = thymine
  modified_base 2018: mod_base = OTHER; note = thymine
  modified_base 2026..2027: mod_base = OTHER; note = thymine
  modified_base 2030: mod_base = OTHER; note = thymine
  modified_base 2032: mod_base = OTHER; note = thymine
  modified_base 2038..2039: mod_base = OTHER; note = thymine
  modified_base 2042: mod_base = OTHER; note = thymine
  modified_base 2054: mod_base = OTHER; note = thymine
  modified_base 2057: mod_base = OTHER; note = thymine
  modified_base 2060: mod_base = OTHER; note = thymine
  modified_base 2084: mod_base = OTHER; note = thymine
  modified_base 2086..2087: mod_base = OTHER; note = thymine
  modified_base 2092: mod_base = OTHER; note = thymine
  modified_base 2105: mod_base = OTHER; note = thymine
  modified_base 2114: mod_base = OTHER; note = thymine
  modified_base 2117: mod_base = OTHER; note = thymine
  modified_base 2125..2126: mod_base = OTHER; note = thymine
  modified_base 2128: mod_base = OTHER; note = thymine
  modified_base 2135: mod_base = OTHER; note = thymine
  modified_base 2144: mod_base = OTHER; note = thymine
  modified_base 2174: mod_base = OTHER; note = thymine
  modified_base 2183: mod_base = OTHER; note = thymine
  modified_base 2186: mod_base = OTHER; note = thymine
  modified_base 2189: mod_base = OTHER; note = thymine
  modified_base 2194: mod_base = OTHER; note = thymine
  modified_base 2197: mod_base = OTHER; note = thymine
  modified_base 2204: mod_base = OTHER; note = thymine
  modified_base 2210: mod_base = OTHER; note = thymine
  modified_base 2222: mod_base = OTHER; note = thymine
  modified_base 2230..2231: mod_base = OTHER; note = thymine
  modified_base 2234: mod_base = OTHER; note = thymine
  modified_base 2239: mod_base = OTHER; note = thymine
  modified_base 2249: mod_base = OTHER; note = thymine
  modified_base 2257..2258: mod_base = OTHER; note = thymine
  modified_base 2273: mod_base = OTHER; note = thymine
  modified_base 2294: mod_base = OTHER; note = thymine
  modified_base 2297: mod_base = OTHER; note = thymine
  modified_base 2314..2315: mod_base = OTHER; note = thymine
  modified_base 2326: mod_base = OTHER; note = thymine
  modified_base 2332..2333: mod_base = OTHER; note = thymine
  modified_base 2335..2336: mod_base = OTHER; note = thymine
  modified_base 2348: mod_base = OTHER; note = thymine
  modified_base 2351: mod_base = OTHER; note = thymine
  modified_base 2354: mod_base = OTHER; note = thymine
  modified_base 2360: mod_base = OTHER; note = thymine
  modified_base 2362..2363: mod_base = OTHER; note = thymine
  modified_base 2389..2390: mod_base = OTHER; note = thymine
  modified_base 2417: mod_base = OTHER; note = thymine
  modified_base 2426: mod_base = OTHER; note = thymine
  modified_base 2429: mod_base = OTHER; note = thymine
  modified_base 2441: mod_base = OTHER; note = thymine
  modified_base 2443: mod_base = OTHER; note = thymine
  modified_base 2446: mod_base = OTHER; note = thymine
  modified_base 2462: mod_base = OTHER; note = thymine
  modified_base 2470: mod_base = OTHER; note = thymine
  modified_base 2474: mod_base = OTHER; note = thymine
  modified_base 2483: mod_base = OTHER; note = thymine
  modified_base 2485..2486: mod_base = OTHER; note = thymine
  modified_base 2489: mod_base = OTHER; note = thymine
  modified_base 2491: mod_base = OTHER; note = thymine
  modified_base 2513: mod_base = OTHER; note = thymine
  modified_base 2515: mod_base = OTHER; note = thymine
  modified_base 2537: mod_base = OTHER; note = thymine
  modified_base 2542: mod_base = OTHER; note = thymine
  modified_base 2554..2555: mod_base = OTHER; note = thymine
  modified_base 2558: mod_base = OTHER; note = thymine
  modified_base 2576: mod_base = OTHER; note = thymine
  modified_base 2578: mod_base = OTHER; note = thymine
  modified_base 2582: mod_base = OTHER; note = thymine
  modified_base 2591: mod_base = OTHER; note = thymine
  modified_base 2593: mod_base = OTHER; note = thymine
  modified_base 2597: mod_base = OTHER; note = thymine
  modified_base 2606: mod_base = OTHER; note = thymine
  modified_base 2612: mod_base = OTHER; note = thymine
  modified_base 2621: mod_base = OTHER; note = thymine
  modified_base 2630: mod_base = OTHER; note = thymine
  modified_base 2633: mod_base = OTHER; note = thymine
  modified_base 2638: mod_base = OTHER; note = thymine
  modified_base 2657: mod_base = OTHER; note = thymine
  modified_base 2663: mod_base = OTHER; note = thymine
  modified_base 2665: mod_base = OTHER; note = thymine
  modified_base 2675: mod_base = OTHER; note = thymine
  modified_base 2687: mod_base = OTHER; note = thymine
  modified_base 2695: mod_base = OTHER; note = thymine
  modified_base 2719..2720: mod_base = OTHER; note = thymine
  modified_base 2740..2741: mod_base = OTHER; note = thymine
  modified_base 2743: mod_base = OTHER; note = thymine
  modified_base 2762: mod_base = OTHER; note = thymine
  modified_base 2765: mod_base = OTHER; note = thymine
  modified_base 2774: mod_base = OTHER; note = thymine
  modified_base 2780: mod_base = OTHER; note = thymine
  modified_base 2797: mod_base = OTHER; note = thymine
  modified_base 2804: mod_base = OTHER; note = thymine
  modified_base 2807: mod_base = OTHER; note = thymine
  modified_base 2810: mod_base = OTHER; note = thymine
  modified_base 2827: mod_base = OTHER; note = thymine
  modified_base 2834: mod_base = OTHER; note = thymine
  modified_base 2852: mod_base = OTHER; note = thymine
  modified_base 2855: mod_base = OTHER; note = thymine
  modified_base 2861: mod_base = OTHER; note = thymine
  modified_base 2867: mod_base = OTHER; note = thymine
  modified_base 2869..2870: mod_base = OTHER; note = thymine
  modified_base 2872: mod_base = OTHER; note = thymine
  modified_base 2879: mod_base = OTHER; note = thymine
  modified_base 2902: mod_base = OTHER; note = thymine
  modified_base 2905..2906: mod_base = OTHER; note = thymine
  modified_base 2909: mod_base = OTHER; note = thymine
  modified_base 2912: mod_base = OTHER; note = thymine
  modified_base 2918: mod_base = OTHER; note = thymine
  modified_base 2920: mod_base = OTHER; note = thymine
  modified_base 2926: mod_base = OTHER; note = thymine
  modified_base 2933: mod_base = OTHER; note = thymine
  modified_base 2945: mod_base = OTHER; note = thymine
  modified_base 2948: mod_base = OTHER; note = thymine
  modified_base 2957: mod_base = OTHER; note = thymine
  modified_base 2962: mod_base = OTHER; note = thymine
  modified_base 2971: mod_base = OTHER; note = thymine
  modified_base 2978: mod_base = OTHER; note = thymine
  modified_base 2986: mod_base = OTHER; note = thymine
  modified_base 2989: mod_base = OTHER; note = thymine
  modified_base 2995..2996: mod_base = OTHER; note = thymine
  modified_base 2998: mod_base = OTHER; note = thymine
  modified_base 3001..3002: mod_base = OTHER; note = thymine
  modified_base 3004: mod_base = OTHER; note = thymine
  modified_base 3008: mod_base = OTHER; note = thymine
  modified_base 3016: mod_base = OTHER; note = thymine
  modified_base 3023: mod_base = OTHER; note = thymine
  modified_base 3026: mod_base = OTHER; note = thymine
  modified_base 3031..3032: mod_base = OTHER; note = thymine
  modified_base 3049: mod_base = OTHER; note = thymine
  modified_base 3056: mod_base = OTHER; note = thymine
  modified_base 3061..3062: mod_base = OTHER; note = thymine
  modified_base 3067: mod_base = OTHER; note = thymine
  modified_base 3070: mod_base = OTHER; note = thymine
  modified_base 3074: mod_base = OTHER; note = thymine
  modified_base 3079: mod_base = OTHER; note = thymine
  modified_base 3085: mod_base = OTHER; note = thymine
  modified_base 3088: mod_base = OTHER; note = thymine
  modified_base 3100..3101: mod_base = OTHER; note = thymine
  modified_base 3103: mod_base = OTHER; note = thymine
  modified_base 3107: mod_base = OTHER; note = thymine
  modified_base 3112: mod_base = OTHER; note = thymine
  modified_base 3127: mod_base = OTHER; note = thymine
  modified_base 3142..3143: mod_base = OTHER; note = thymine
  modified_base 3149: mod_base = OTHER; note = thymine
  modified_base 3151: mod_base = OTHER; note = thymine
  modified_base 3164: mod_base = OTHER; note = thymine
  modified_base 3167: mod_base = OTHER; note = thymine
  modified_base 3170: mod_base = OTHER; note = thymine
  modified_base 3173: mod_base = OTHER; note = thymine
  modified_base 3181: mod_base = OTHER; note = thymine
  modified_base 3188: mod_base = OTHER; note = thymine
  modified_base 3197: mod_base = OTHER; note = thymine
  modified_base 3209: mod_base = OTHER; note = thymine
  modified_base 3217: mod_base = OTHER; note = thymine
  modified_base 3224: mod_base = OTHER; note = thymine
  modified_base 3242: mod_base = OTHER; note = thymine
  misc_feature 1..3249: note = Synthetic
  source 1..3249: mol_type = other RNA
atggccgccttcaagcccaaccccatcaactacatcctgggcctggccatcggcatcgcctccgtgggctgggccatggtggagatcgacgaggaggagaaccccatccggctgatcgacctgggcgtgcgggtgttcgagcgggccgaggtgcccaagaccggcgactccctggccatggcccggcggctggcccggtccgtgcggcggctgacccggcggcgggcccaccggctgctgcgggcccggcggctgctgaagcgggagggcgtgctgcaggccgccgacttcgacgagaacggcctgatcaagtccctgcccaacaccccctggcagctgcgggccgccgccctggaccggaagctgacccccctggagtggtccgccgtgctgctgcacctgatcaagcaccggggctacctgtcccagcggaagaacgagggcgagaccgccgacaaggagctgggcgccctgctgaagggcgtggccaacaacgcccacgccctgcagaccggcgacttccggacccccgccgagctggccctgaacaagttcgagaaggagtccggccacatccggaaccagcggggcgactactcccacaccttctcccggaaggacctgcaggccgagctgatcctgctgttcgagaagcagaaggagttcggcaacccccacgtgtccggcggcctgaaggagggcatcgagaccctgctgatgacccagcggcccgccctgtccggcgacgccgtgcagaagatgctgggccactgcaccttcgagcccgccgagcccaaggccgccaagaacacctacaccgccgagcggttcatctggctgaccaagctgaacaacctgcggatcctggagcagggctccgagcggcccctgaccgacaccgagcgggccaccctgatggacgagccctaccggaagtccaagctgacctacgcccaggcccggaagctgctgggcctggaggacaccgccttcttcaagggcctgcggtacggcaaggacaacgccgaggcctccaccctgatggagatgaaggcctaccacgccatctcccgggccctggagaaggagggcctgaaggacaagaagtcccccctgaacctgtcctccgagctgcaggacgagatcggcaccgccttctccctgttcaagaccgacgaggacatcaccggccggctgaaggaccgggtgcagcccgagatcctggaggccctgctgaagcacatctccttcgacaagttcgtgcagatctccctgaaggccctgcggcggatcgtgcccctgatggagcagggcaagcggtacgacgaggcctgcgccgagatctacggcgaccactacggcaagaagaacaccgaggagaagatctacctgccccccatccccgccgacgagatccggaaccccgtggtgctgcgggccctgtcccaggcccggaaggtgatcaacggcgtggtgcggcggtacggctcccccgcccggatccacatcgagaccgcccgggaggtgggcaagtccttcaaggaccggaaggagatcgagaagcggcaggaggagaaccggaaggaccgggagaaggccgccgccaagttccgggagtacttccccaacttcgtgggcgagcccaagtccaaggacatcctgaagctgcggctgtacgagcagcagcacggcaagtgcctgtactccggcaaggagatcaacctggtgcggctgaacgagaagggctacgtggagatcgaccacgccctgcccttctcccggacctgggacgactccttcaacaacaaggtgctggtgctgggctccgagaaccagaacaagggcaaccagaccccctacgagtacttcaacggcaaggacaactcccgggagtggcaggagttcaaggcccgggtggagacctcccggttcccccggtccaagaagcagcggatcctgctgcagaagttcgacgaggacggcttcaaggagtgcaacctgaacgacacccggtacgtgaaccggttcctgtgccagttcgtggccgaccacatcctgctgaccggcaagggcaagcggcgggtgttcgcctccaacggccagatcaccaacctgctgcggggcttctggggcctgcggaaggtgcgggccgagaacgaccggcaccacgccctggacgccgtggtggtggcctgctccaccgtggccatgcagcagaagatcacccggttcgtgcggtacaaggagatgaacgccttcgacggcaagaccatcgacaaggagaccggcaaggtgctgcaccagaagacccacttcccccagccctgggagttcttcgcccaggaggtgatgatccgggtgttcggcaagcccgacggcaagcccgagttcgaggaggccgacacccccgagaagctgcggaccctgctggccgagaagctgtcctcccggcccgaggccgtgcacgagtacgtgacccccctgttcgtgtcccgggcccccaaccggaagatgtccggcgcccacaaggacaccctgcggtccgccaagcggttcgtgaagcacaacgagaagatctccgtgaagcgggtgtggctgaccgagatcaagctggccgacctggagaacatggtgaactacaagaacggccgggagatcgagctgtacgaggccctgaaggcccggctggaggcctacggcggcaacgccaagcaggccttcgaccccaaggacaaccccttctacaagaagggcggccagctggtgaaggccgtgcgggtggagaagacccaggagtccggcgtgctgctgaacaagaagaacgcctacaccatcgccgacaacggcgacatggtgcgggtggacgtgttctgcaaggtggacaagaagggcaagaaccagtacttcatcgtgcccatctacgcctggcaggtggccgagaacatcctgcccgacatcgactgcaagggctaccggatcgacgactcctacaccttctgcttctccctgcacaagtacgacctgatcgccttccagaaggacgagaagtccaaggtggagttcgcctactacatcaactgcgactcctccaacggccggttctacctggcctggcacgacaagggctccaaggagcagcagttccggatctccacccagaacctggtgctgatccagaagtaccaggtgaacgagctgggcaaggagatccggccctgccggctgaagaagcggccccccgtgcggtaa

SEQ ID NO: 269 - protein, 1082 aa, synthetic construct
  REGION 1..1082: note = Synthetic
MAAFKPNPINYILGLDIGIASVGWAMVEIDEEENPIRLIDLGVRVFERAEVPKTGDSLAMARRLARSVRRLTRRRAHRLLRARRLLKREGVLQAADFDENGLIKSLPNTPWQLRAAALDRKLTPLEWSAVLLHLIKHRGYLSQRKNEGETADKELGALLKGVANNAHALQTGDFRTPAELALNKFEKESGHIRNQRGDYSHTFSRKDLQAELILLFEKQKEFGNPHVSGGLKEGIETLLMTQRPALSGDAVQKMLGHCTFEPAEPKAAKNTYTAERFIWLTKLNNLRILEQGSERPLTDTERATLMDEPYRKSKLTYAQARKLLGLEDTAFFKGLRYGKDNAEASTLMEMKAYHAISRALEKEGLKDKKSPLNLSSELQDEIGTAFSLFKTDEDITGRLKDRVQPEILEALLKHISFDKFVQISLKALRRIVPLMEQGKRYDEACAEIYGDHYGKKNTEEKIYLPPIPADEIRNPVVLRALSQARKVINGVVRRYGSPARIHIETAREVGKSFKDRKEIEKRQEENRKDREKAAAKFREYFPNFVGEPKSKDILKLRLYEQQHGKCLYSGKEINLVRLNEKGYVEIDAALPFSRTWDDSFNNKVLVLGSENQNKGNQTPYEYFNGKDNSREWQEFKARVETSRFPRSKKQRILLQKFDEDGFKECNLNDTRYVNRFLCQFVADHILLTGKGKRRVFASNGQITNLLRGFWGLRKVRAENDRHHALDAVVVACSTVAMQQKITRFVRYKEMNAFDGKTIDKETGKVLHQKTHFPQPWEFFAQEVMIRVFGKPDGKPEFEEADTPEKLRTLLAEKLSSRPEAVHEYVTPLFVSRAPNRKMSGAHKDTLRSAKRFVKHNEKISVKRVWLTEIKLADLENMVNYKNGREIELYEALKARLEAYGGNAKQAFDPKDNPFYKKGGQLVKAVRVEKTQESGVLLNKKNAYTIADNGDMVRVDVFCKVDKKGKNQYFIVPIYAWQVAENILPDIDCKGYRIDDSYTFCFSLHKYDLIAFQKDEKSKVEFAYYINCDSSNGRFYLAWHDKGSKEQQFRISTQNLVLIQKYQVNELGKEIRPCRLKKRPPVR

SEQ ID NO: 270 - DNA, 3243 bp, synthetic construct
  misc_feature 1..3243: note = Synthetic
  source 1..3243: mol_type = other DNA
gctgcttttaagcctaatcctattaattatattcttggtcttgatattggtattgcttctgttggttgggctatggttgagattgatgaggaggagaatcctattcgtcttattgatcttggtgttcgtgtttttgagcgtgctgaggttcctaagactggtgattctcttgctatggctcgtcgtcttgctcgttctgttcgtcgtcttactcgtcgtcgtgctcatcgtcttcttcgtgctcgtcgtcttcttaagcgtgagggtgttcttcaggctgctgattttgatgagaatggtcttattaagtctcttcctaatactccttggcagcttcgtgctgctgctcttgatcgtaagcttactcctcttgagtggtctgctgttcttcttcatcttattaagcatcgtggttatctttctcagcgtaagaatgagggtgagactgctgataaggagcttggtgctcttcttaagggtgttgctaataatgctcatgctcttcagactggtgattttcgtactcctgctgagcttgctcttaataagtttgagaaggagtctggtcatattcgtaatcagcgtggtgattattctcatactttttctcgtaaggatcttcaggctgagcttattcttctttttgagaagcagaaggagtttggtaatcctcatgtttctggtggtcttaaggagggtattgagactcttcttatgactcagcgtcctgctctttctggtgatgctgttcagaagatgcttggtcattgtacttttgagcctgctgagcctaaggctgctaagaatacttatactgctgagcgttttatttggcttactaagcttaataatcttcgtattcttgagcagggttctgagcgtcctcttactgatactgagcgtgctactcttatggatgagccttatcgtaagtctaagcttacttatgctcaggctcgtaagcttcttggtcttgaggatactgctttttttaagggtcttcgttatggtaaggataatgctgaggcttctactcttatggagatgaaggcttatcatgctatttctcgtgctcttgagaaggagggtcttaaggataagaagtctcctcttaatctttcttctgagcttcaggatgagattggtactgctttttctctttttaagactgatgaggatattactggtcgtcttaaggatcgtgttcagcctgagattcttgaggctcttcttaagcatatttcttttgataagtttgttcagatttctcttaaggctcttcgtcgtattgttcctcttatggagcagggtaagcgttatgatgaggcttgtgctgagatttatggtgatcattatggtaagaagaatactgaggagaagatttatcttcctcctattcctgctgatgagattcgtaatcctgttgttcttcgtgctctttctcaggctcgtaaggttattaatggtgttgttcgtcgttatggttctcctgctcgtattcatattgagactgctcgtgaggttggtaagtcttttaaggatcgtaaggagattgagaagcgtcaggaggagaatcgtaaggatcgtgagaaggctgctgctaagtttcgtgagtattttcctaattttgttggtgagcctaagtctaaggatattcttaagcttcgtctttatgagcagcagcatggtaagtgtctttattctggtaaggagattaatcttgttcgtcttaatgagaagggttatgttgagattgatgctgctcttcctttttctcgtacttgggatgattcttttaataataaggttcttgttcttggttctgagaatcagaataagggtaatcagactccttatgagtattttaatggtaaggataattctcgtgagtggcaggagtttaaggctcgtgttgagacttctcgttttcctcgttctaagaagcagcgtattcttcttcagaagtttgatgaggatggttttaaggagtgtaatcttaatgatactcgttatgttaatcgttttctttgtcagtttgttgctgatcatattcttcttactggtaagggtaagcgtcgtgtttttgcttctaatggtcagattactaatcttcttcgtggtttttggggtcttcgtaaggttcgtgctgagaatgatcgtcatcatgctcttgatgctgttgttgttgcttgttctactgttgctatgcagcagaagattactcgttttgttcgttataaggagatgaatgcttttgatggtaagactattgataaggagactggtaaggttcttcatcagaagactcattttcctcagccttgggagttttttgctcaggaggttatgattcgtgtttttggtaagcctgatggtaagcctgagtttgaggaggctgatactcctgagaagcttcgtactcttcttgctgagaagctttcttctcgtcctgaggctgttcatgagtatgttactcctctttttgtttctcgtgctcctaatcgtaagatgtctggtgctcataaggatactcttcgttctgctaagcgttttgttaagcataatgagaagatttctgttaagcgtgtttggcttactgagattaagcttgctgatcttgagaatatggttaattataagaatggtcgtgagattgagctttatgaggctcttaaggctcgtcttgaggcttatggtggtaatgctaagcaggcttttgatcctaaggataatcctttttataagaagggtggtcagcttgttaaggctgttcgtgttgagaagactcaggagtctggtgttcttcttaataagaagaatgcttatactattgctgataatggtgatatggttcgtgttgatgttttttgtaaggttgataagaagggtaagaatcagtattttattgttcctatttatgcttggcaggttgctgagaatattcttcctgatattgattgtaagggttatcgtattgatgattcttatactttttgtttttctcttcataagtatgatcttattgcttttcagaaggatgagaagtctaaggttgagtttgcttattatattaattgtgattcttctaatggtcgtttttatcttgcttggcatgataagggttctaaggagcagcagtttcgtatttctactcagaatcttgttcttattcagaagtatcaggttaatgagcttggtaaggagattcgtccttgtcgtcttaagaagcgtcctcctgttcgt

SEQ ID NO: 271 - DNA, 3243 bp, synthetic construct
  misc_feature 1..3243: note = Synthetic
  source 1..3243: mol_type = other DNA
gccgccttcaagcccaaccccatcaactacatcctgggcctggacatcggcatcgcctccgtgggctgggccatggtggagatcgacgaggaggagaaccccatccggctgatcgacctgggcgtgcgggtgttcgagcgggccgaggtgcccaagaccggcgactccctggccatggcccggcggctggcccggtccgtgcggcggctgacccggcggcgggcccaccggctgctgcgggcccggcggctgctgaagcgggagggcgtgctgcaggccgccgacttcgacgagaacggcctgatcaagtccctgcccaacaccccctggcagctgcgggccgccgccctggaccggaagctgacccccctggagtggtccgccgtgctgctgcacctgatcaagcaccggggctacctgtcccagcggaagaacgagggcgagaccgccgacaaggagctgggcgccctgctgaagggcgtggccaacaacgcccacgccctgcagaccggcgacttccggacccccgccgagctggccctgaacaagttcgagaaggagtccggccacatccggaaccagcggggcgactactcccacaccttctcccggaaggacctgcaggccgagctgatcctgctgttcgagaagcagaaggagttcggcaacccccacgtgtccggcggcctgaaggagggcatcgagaccctgctgatgacccagcggcccgccctgtccggcgacgccgtgcagaagatgctgggccactgcaccttcgagcccgccgagcccaaggccgccaagaacacctacaccgccgagcggttcatctggctgaccaagctgaacaacctgcggatcctggagcagggctccgagcggcccctgaccgacaccgagcgggccaccctgatggacgagccctaccggaagtccaagctgacctacgcccaggcccggaagctgctgggcctggaggacaccgccttcttcaagggcctgcggtacggcaaggacaacgccgaggcctccaccctgatggagatgaaggcctaccacgccatctcccgggccctggagaaggagggcctgaaggacaagaagtcccccctgaacctgtcctccgagctgcaggacgagatcggcaccgccttctccctgttcaagaccgacgaggacatcaccggccggctgaaggaccgggtgcagcccgagatcctggaggccctgctgaagcacatctccttcgacaagttcgtgcagatctccctgaaggccctgcggcggatcgtgcccctgatggagcagggcaagcggtacgacgaggcctgcgccgagatctacggcgaccactacggcaagaagaacaccgaggagaagatctacctgccccccatccccgccgacgagatccggaaccccgtggtgctgcgggccctgtcccaggcccggaaggtgatcaacggcgtggtgcggcggtacggctcccccgcccggatccacatcgagaccgcccgggaggtgggcaagtccttcaaggaccggaaggagatcgagaagcggcaggaggagaaccggaaggaccgggagaaggccgccgccaagttccgggagtacttccccaacttcgtgggcgagcccaagtccaaggacatcctgaagctgcggctgtacgagcagcagcacggcaagtgcctgtactccggcaaggagatcaacctggtgcggctgaacgagaagggctacgtggagatcgacgccgccctgcccttctcccggacctgggacgactccttcaacaacaaggtgctggtgctgggctccgagaaccagaacaagggcaaccagaccccctacgagtacttcaacggcaaggacaactcccgggagtggcaggagttcaaggcccgggtggagacctcccggttcccccggtccaagaagcagcggatcctgctgcagaagttcgacgaggacggcttcaaggagtgcaacctgaacgacacccggtacgtgaaccggttcctgtgccagttcgtggccgaccacatcctgctgaccggcaagggcaagcggcgggtgttcgcctccaacggccagatcaccaacctgctgcggggcttctggggcctgcggaaggtgcgggccgagaacgaccggcaccacgccctggacgccgtggtggtggcctgctccaccgtggccatgcagcagaagatcacccggttcgtgcggtacaaggagatgaacgccttcgacggcaagaccatcgacaaggagaccggcaaggtgctgcaccagaagacccacttcccccagccctgggagttcttcgcccaggaggtgatgatccgggtgttcggcaagcccgacggcaagcccgagttcgaggaggccgacacccccgagaagctgcggaccctgctggccgagaagctgtcctcccggcccgaggccgtgcacgagtacgtgacccccctgttcgtgtcccgggcccccaaccggaagatgtccggcgcccacaaggacaccctgcggtccgccaagcggttcgtgaagcacaacgagaagatctccgtgaagcgggtgtggctgaccgagatcaagctggccgacctggagaacatggtgaactacaagaacggccgggagatcgagctgtacgaggccctgaaggcccggctggaggcctacggcggcaacgccaagcaggccttcgaccccaaggacaaccccttctacaagaagggcggccagctggtgaaggccgtgcgggtggagaagacccaggagtccggcgtgctgctgaacaagaagaacgcctacaccatcgccgacaacggcgacatggtgcgggtggacgtgttctgcaaggtggacaagaagggcaagaaccagtacttcatcgtgcccatctacgcctggcaggtggccgagaacatcctgcccgacatcgactgcaagggctaccggatcgacgactcctacaccttctgcttctccctgcacaagtacgacctgatcgccttccagaaggacgagaagtccaaggtggagttcgcctactacatcaactgcgactcctccaacggccggttctacctggcctggcacgacaagggctccaaggagcagcagttccggatctccacccagaacctggtgctgatccagaagtaccaggtgaacgagctgggcaaggagatccggccctgccggctgaagaagcggccccccgtgcgg

SEQ ID NO: 272 - DNA, 3243 bp, synthetic construct
  misc_feature 1..3243: note = Synthetic
  source 1..3243: mol_type = other DNA
gcagcattcaaaccaaacccaatcaactacatcctaggactagacatcggaatcgcatcagtaggatgagcaatggtagaaatcgacgaagaagaaaacccaatccgactaatcgacctaggagtacgagtattcgaacgagcagaagtaccaaaaacaggagactcactagcaatggcacgacgactagcacgatcagtacgacgactaacacgacgacgagcacaccgactactacgagcacgacgactactaaaacgagaaggagtactacaagcagcagacttcgacgaaaacggactaatcaaatcactaccaaacacaccatgacaactacgagcagcagcactagaccgaaaactaacaccactagaatgatcagcagtactactacacctaatcaaacaccgaggatacctatcacaacgaaaaaacgaaggagaaacagcagacaaagaactaggagcactactaaaaggagtagcaaacaacgcacacgcactacaaacaggagacttccgaacaccagcagaactagcactaaacaaattcgaaaaagaatcaggacacatccgaaaccaacgaggagactactcacacacattctcacgaaaagacctacaagcagaactaatcctactattcgaaaaacaaaaagaattcggaaacccacacgtatcaggaggactaaaagaaggaatcgaaacactactaatgacacaacgaccagcactatcaggagacgcagtacaaaaaatgctaggacactgcacattcgaaccagcagaaccaaaagcagcaaaaaacacatacacagcagaacgattcatctgactaacaaaactaaacaacctacgaatcctagaacaaggatcagaacgaccactaacagacacagaacgagcaacactaatggacgaaccataccgaaaatcaaaactaacatacgcacaagcacgaaaactactaggactagaagacacagcattcttcaaaggactacgatacggaaaagacaacgcagaagcatcaacactaatggaaatgaaagcataccacgcaatctcacgagcactagaaaaagaaggactaaaagacaaaaaatcaccactaaacctatcatcagaactacaagacgaaatcggaacagcattctcactattcaaaacagacgaagacatcacaggacgactaaaagaccgagtacaaccagaaatcctagaagcactactaaaacacatctcattcgacaaattcgtacaaatctcactaaaagcactacgacgaatcgtaccactaatggaacaaggaaaacgatacgacgaagcatgcgcagaaatctacggagaccactacggaaaaaaaaacacagaagaaaaaatctacctaccaccaatcccagcagacgaaatccgaaacccagtagtactacgagcactatcacaagcacgaaaagtaatcaacggagtagtacgacgatacggatcaccagcacgaatccacatcgaaacagcacgagaagtaggaaaatcattcaaagaccgaaaagaaatcgaaaaacgacaagaagaaaaccgaaaagaccgagaaaaagcagcagcaaaattccgagaatacttcccaaacttcgtaggagaaccaaaatcaaaagacatcctaaaactacgactatacgaacaacaacacggaaaatgcctatactcaggaaaagaaatcaacctagtacgactaaacgaaaaaggatacgtagaaatcgacgcagcactaccattctcacgaacatgagacgactcattcaacaacaaagtactagtactaggatcagaaaaccaaaacaaaggaaaccaaacaccatacgaatacttcaacggaaaagacaactcacgagaatgacaagaattcaaagcacgagtagaaacatcacgattcccacgatcaaaaaaacaacgaatcctactacaaaaattcgacgaagacggattcaaagaatgcaacctaaacgacacacgatacgtaaaccgattcctatgccaattcgtagcagaccacatcctactaacaggaaaaggaaaacgacgagtattcgcatcaaacggacaaatcacaaacctactacgaggattctgaggactacgaaaagtacgagcagaaaacgaccgacaccacgcactagacgcagtagtagtagcatgctcaacagtagcaatgcaacaaaaaatcacacgattcgtacgatacaaagaaatgaacgcattcgacggaaaaacaatcgacaaagaaacaggaaaagtactacaccaaaaaacacacttcccacaaccatgagaattcttcgcacaagaagtaatgatccgagtattcggaaaaccagacggaaaaccagaattcgaagaagcagacacaccagaaaaactacgaacactactagcagaaaaactatcatcacgaccagaagcagtacacgaatacgtaacaccactattcgtatcacgagcaccaaaccgaaaaatgtcaggagcacacaaagacacactacgatcagcaaaacgattcgtaaaacacaacgaaaaaatctcagtaaaacgagtatgactaacagaaatcaaactagcagacctagaaaacatggtaaactacaaaaacggacgagaaatcgaactatacgaagcactaaaagcacgactagaagcatacggaggaaacgcaaaacaagcattcgacccaaaagacaacccattctacaaaaaaggaggacaactagtaaaagcagtacgagtagaaaaaacacaagaatcaggagtactactaaacaaaaaaaacgcatacacaatcgcagacaacggagacatggtacgagtagacgtattctgcaaagtagacaaaaaaggaaaaaaccaatacttcatcgtaccaatctacgcatgacaagtagcagaaaacatcctaccagacatcgactgcaaaggataccgaatcgacgactcatacacattctgcttctcactacacaaatacgacctaatcgcattccaaaaagacgaaaaatcaaaagtagaattcgcatactacatcaactgcgactcatcaaacggacgattctacctagcatgacacgacaaaggatcaaaagaacaacaattccgaatctcaacacaaaacctagtactaatccaaaaataccaagtaaacgaactaggaaaagaaatccgaccatgccgactaaaaaaacgaccaccagtacga

SEQ ID NO: 273 - RNA, 3249 nt, synthetic construct
  modified_base 2: mod_base = OTHER; note = thymine
  modified_base 6: mod_base = OTHER; note = thymine
  modified_base 9..12: mod_base = OTHER; note = thymine
  modified_base 18: mod_base = OTHER; note = thymine
  modified_base 21: mod_base = OTHER; note = thymine
  modified_base 24: mod_base = OTHER; note = thymine
  modified_base 26..27: mod_base = OTHER; note = thymine
  modified_base 30..31: mod_base = OTHER; note = thymine
  modified_base 33: mod_base = OTHER; note = thymine
  modified_base 35..36: mod_base = OTHER; note = thymine
  modified_base 38..39: mod_base = OTHER; note = thymine
  modified_base 42: mod_base = OTHER; note = thymine
  modified_base 44..45: mod_base = OTHER; note = thymine
  modified_base 48: mod_base = OTHER; note = thymine
  modified_base 50..51: mod_base = OTHER; note = thymine
  modified_base 54: mod_base = OTHER; note = thymine
  modified_base 56..57: mod_base = OTHER; note = thymine
  modified_base 60..61: mod_base = OTHER; note = thymine
  modified_base 63: mod_base = OTHER; note = thymine
  modified_base 65..66: mod_base = OTHER; note = thymine
  modified_base 69..70: mod_base = OTHER; note = thymine
  modified_base 75: mod_base = OTHER; note = thymine
  modified_base 77: mod_base = OTHER; note = thymine
  modified_base 80..81: mod_base = OTHER; note = thymine
  modified_base 86..87: mod_base = OTHER; note = thymine
  modified_base 90: mod_base = OTHER; note = thymine
  modified_base 102: mod_base = OTHER; note = thymine
  modified_base 105: mod_base = OTHER; note = thymine
  modified_base 107..108: mod_base = OTHER; note = thymine
  modified_base 111: mod_base = OTHER; note = thymine
  modified_base 113..114: mod_base = OTHER; note = thymine
  modified_base 116..117: mod_base = OTHER; note = thymine
  modified_base 120: mod_base = OTHER; note = thymine
  modified_base 122..123: mod_base = OTHER; note = thymine
  modified_base 126: mod_base = OTHER; note = thymine
  modified_base 128..129: mod_base = OTHER; note = thymine
  modified_base 132: mod_base = OTHER; note = thymine
  modified_base 134..138: mod_base = OTHER; note = thymine
  modified_base 144: mod_base = OTHER; note = thymine
  modified_base 147: mod_base = OTHER; note = thymine
  modified_base 152..153: mod_base = OTHER; note = thymine
  modified_base 156: mod_base = OTHER; note = thymine
  modified_base 162: mod_base = OTHER; note = thymine
  modified_base 165: mod_base = OTHER; note = thymine
  modified_base 168..169: mod_base = OTHER; note = thymine
  modified_base 171: mod_base = OTHER; note = thymine
  modified_base 173..174: mod_base = OTHER; note = thymine
  modified_base 177: mod_base = OTHER; note = thymine
  modified_base 179: mod_base = OTHER; note = thymine
  modified_base 183: mod_base = OTHER; note = thymine
  modified_base 186: mod_base = OTHER; note = thymine
  modified_base 189: mod_base = OTHER; note = thymine
  modified_base 191..192: mod_base = OTHER; note = thymine
  modified_base 195: mod_base = OTHER; note = thymine
  modified_base 198..199: mod_base = OTHER; note = thymine
  modified_base 201: mod_base = OTHER; note = thymine
  modified_base 203..204: mod_base = OTHER; note = thymine
  modified_base 207: mod_base = OTHER; note = thymine
  modified_base 210: mod_base = OTHER; note = thymine
  modified_base 212..213: mod_base = OTHER; note = thymine
  modified_base 216: mod_base = OTHER; note = thymine
  modified_base 219: mod_base = OTHER; note = thymine
  modified_base 222: mod_base = OTHER; note = thymine
  modified_base 225: mod_base = OTHER; note = thymine
  modified_base 228: mod_base = OTHER; note = thymine
  modified_base 231: mod_base = OTHER; note = thymine
  modified_base 234: mod_base = OTHER; note = thymine
  modified_base 236..237: mod_base = OTHER; note = thymine
  modified_base 239..240: mod_base = OTHER; note = thymine
  modified_base 243: mod_base = OTHER; note = thymine
  modified_base 246: mod_base = OTHER; note = thymine
  modified_base 249: mod_base = OTHER; note = thymine
  modified_base 252: mod_base = OTHER; note = thymine
  modified_base 254..255: mod_base = OTHER; note = thymine
  modified_base 257..258: mod_base = OTHER; note = thymine
  modified_base 264: mod_base = OTHER; note = thymine
  modified_base 270: mod_base = OTHER; note = thymine
  modified_base 272..273: mod_base = OTHER; note = thymine
  modified_base 275..276: mod_base = OTHER; note = thymine
  modified_base 282: mod_base = OTHER; note = thymine
  modified_base 285: mod_base = OTHER; note = thymine
  modified_base 288..291: mod_base = OTHER; note = thymine
  modified_base 294: mod_base = OTHER; note = thymine
  modified_base 300: mod_base = OTHER; note = thymine
  modified_base 303: mod_base = OTHER; note = thymine
  modified_base 305..306: mod_base = OTHER; note = thymine
  modified_base 308..309: mod_base = OTHER; note = thymine
  modified_base 313: mod_base = OTHER; note = thymine
  modified_base 315: mod_base = OTHER; note = thymine
  modified_base 317..318: mod_base = OTHER; note = thymine
  modified_base 321: mod_base = OTHER; note = thymine
  modified_base 324: mod_base = OTHER; note = thymine
  modified_base 327: mod_base = OTHER; note = thymine
  modified_base 330..331: mod_base = OTHER; note = thymine
  modified_base 338..339: mod_base = OTHER; note = thymine
  modified_base 342: mod_base = OTHER; note = thymine
  modified_base 345: mod_base = OTHER; note = thymine
  modified_base 348: mod_base = OTHER; note = thymine
  modified_base 351: mod_base = OTHER; note = thymine
  modified_base 353..354: mod_base = OTHER; note = thymine
  modified_base 357: mod_base = OTHER; note = thymine
  modified_base 360: mod_base = OTHER; note = thymine
  modified_base 365..366: mod_base = OTHER; note = thymine
  modified_base 369: mod_base = OTHER; note = thymine
  modified_base 372: mod_base = OTHER; note = thymine
  modified_base 374..375: mod_base = OTHER; note = thymine
  modified_base 379: mod_base = OTHER; note = thymine
  modified_base 382: mod_base = OTHER; note = thymine
  modified_base 384: mod_base = OTHER; note = thymine
  modified_base 387: mod_base = OTHER; note = thymine
  modified_base 389..390: mod_base = OTHER; note = thymine
  modified_base 392..393: mod_base = OTHER; note = thymine
  modified_base 395..396: mod_base = OTHER; note = thymine
  modified_base 399: mod_base = OTHER; note = thymine
  modified_base 401..402: mod_base = OTHER; note = thymine
  modified_base 404..405: mod_base = OTHER; note = thymine
  modified_base 411: mod_base = OTHER; note = thymine
  modified_base 414: mod_base = OTHER; note = thymine
  modified_base 417..418: mod_base = OTHER; note = thymine
  modified_base 420: mod_base = OTHER; note = thymine
  modified_base 422..424: mod_base = OTHER; note = thymine
  modified_base 426: mod_base = OTHER; note = thymine
  modified_base 432: mod_base = OTHER; note = thymine
  modified_base 438: mod_base = OTHER; note = thymine
  modified_base 444: mod_base = OTHER; note = thymine
  modified_base 450: mod_base = OTHER; note = thymine
  modified_base 453: mod_base = OTHER; note = thymine
  modified_base 456: mod_base = OTHER; note = thymine
  modified_base 464..465: mod_base = OTHER; note = thymine
  modified_base 468: mod_base = OTHER; note = thymine
  modified_base 471: mod_base = OTHER; note = thymine
  modified_base 473..474: mod_base = OTHER; note = thymine
  modified_base 476..477: mod_base = OTHER; note = thymine
  modified_base 483: mod_base = OTHER; note = thymine
  modified_base 485..486: mod_base = OTHER; note = thymine
  modified_base 489: mod_base = OTHER; note = thymine
  modified_base 492: mod_base = OTHER; note = thymine
  modified_base 495: mod_base = OTHER; note = thymine
  modified_base 498: mod_base = OTHER; note = thymine
  modified_base 501: mod_base = OTHER; note = thymine
  modified_base 504: mod_base = OTHER; note = thymine
  modified_base 506..507: mod_base = OTHER; note = thymine
  modified_base 513: mod_base = OTHER; note = thymine
  modified_base 516: mod_base = OTHER; note = thymine
  modified_base 519..522: mod_base = OTHER; note = thymine
  modified_base 525: mod_base = OTHER; note = thymine
  modified_base 528: mod_base = OTHER; note = thymine
  modified_base 531: mod_base = OTHER; note = thymine
  modified_base 534: mod_base = OTHER; note = thymine
  modified_base 539..540: mod_base = OTHER; note = thymine
  modified_base 543: mod_base = OTHER; note = thymine
  modified_base 545..546: mod_base = OTHER; note = thymine
  modified_base 549: mod_base = OTHER; note = thymine
  modified_base 553..555: mod_base = OTHER; note = thymine
  modified_base 565: mod_base = OTHER; note = thymine
  modified_base 567: mod_base = OTHER; note = thymine
  modified_base 570: mod_base = OTHER; note = thymine
  modified_base 573: mod_base = OTHER; note = thymine
  modified_base 575..576: mod_base = OTHER; note = thymine
  modified_base 579: mod_base = OTHER; note = thymine
  modified_base 582: mod_base = OTHER; note = thymine
  modified_base 588: mod_base = OTHER; note = thymine
  modified_base 591: mod_base = OTHER; note = thymine
  modified_base 594..595: mod_base = OTHER; note = thymine
  modified_base 597..598: mod_base = OTHER; note = thymine
  modified_base 600: mod_base = OTHER; note = thymine
  modified_base 603: mod_base = OTHER; note = thymine
  modified_base 606..610: mod_base = OTHER; note = thymine
  modified_base 612: mod_base = OTHER; note = thymine
  modified_base 615: mod_base = OTHER; note = thymine
  modified_base 621: mod_base = OTHER; note = thymine
  modified_base 623..624: mod_base = OTHER; note = thymine
  modified_base 630: mod_base = OTHER; note = thymine
  modified_base 635..636: mod_base = OTHER; note = thymine
  modified_base 638..639: mod_base = OTHER; note = thymine
  modified_base 641..642: mod_base = OTHER; note = thymine
  modified_base 644..648: mod_base = OTHER; note = thymine
  modified_base 664..666: mod_base = OTHER; note = thymine
  modified_base 669: mod_base = OTHER; note = thymine
  modified_base 672: mod_base = OTHER; note = thymine
  modified_base 675: mod_base = OTHER; note = thymine
  modified_base 678: mod_base = OTHER; note = thymine
  modified_base 680..682: mod_base = OTHER; note = thymine
  modified_base 684: mod_base = OTHER; note = thymine
  modified_base 687: mod_base = OTHER; note = thymine
  modified_base 690: mod_base = OTHER; note = thymine
  modified_base 692..693: mod_base = OTHER; note = thymine
  modified_base 702: mod_base = OTHER; note = thymine
  modified_base 704..705: mod_base = OTHER; note = thymine
  modified_base 711: mod_base = OTHER; note = thymine
  modified_base 713..714: mod_base = OTHER; note = thymine
  modified_base 716..717: mod_base = OTHER; note = thymine
  modified_base 719: mod_base = OTHER; note = thymine
  modified_base 723: mod_base = OTHER; note = thymine
  modified_base 729: mod_base = OTHER; note = thymine
  modified_base 732: mod_base = OTHER; note = thymine
  modified_base 735: mod_base = OTHER; note = thymine
  modified_base 737..739: mod_base = OTHER; note = thymine
  modified_base 741: mod_base = OTHER; note = thymine
  modified_base 744: mod_base = OTHER; note = thymine
  modified_base 747: mod_base = OTHER; note = thymine
  modified_base 750: mod_base = OTHER; note = thymine
  modified_base 752..753: mod_base = OTHER; note = thymine
  modified_base 761: mod_base = OTHER; note = thymine
  modified_base 764..765: mod_base = OTHER; note = thymine
  modified_base 768: mod_base = OTHER; note = thymine
  modified_base 771..772: mod_base = OTHER; note = thymine
  modified_base 774: mod_base = OTHER; note = thymine
  modified_base 777..780: mod_base = OTHER; note = thymine
  modified_base 786: mod_base = OTHER; note = thymine
  modified_base 789: mod_base = OTHER; note = thymine
  modified_base 795: mod_base = OTHER; note = thymine
  modified_base 801: mod_base = OTHER; note = thymine
  modified_base 804: mod_base = OTHER; note = thymine
  modified_base 810: mod_base = OTHER; note = thymine
  modified_base 813..814: mod_base = OTHER; note = thymine
  modified_base 816: mod_base = OTHER; note = thymine
  modified_base 819: mod_base = OTHER; note = thymine
  modified_base 822: mod_base = OTHER; note = thymine
  modified_base 828..831: mod_base = OTHER; note = thymine
  modified_base 833..835: mod_base = OTHER; note = thymine
  modified_base 839..840: mod_base = OTHER; note = thymine
  modified_base 843: mod_base = OTHER; note = thymine
  modified_base 848..849: mod_base = OTHER; note = thymine
  modified_base 852: mod_base = OTHER; note = thymine
  modified_base 855: mod_base = OTHER; note = thymine
  modified_base 857..858: mod_base = OTHER; note = thymine
  modified_base 861: mod_base = OTHER; note = thymine
  modified_base 863..864: mod_base = OTHER; note = thymine
  modified_base 866..867: mod_base = OTHER; note = thymine
  modified_base 876..877: mod_base = OTHER; note = thymine
  modified_base 879: mod_base = OTHER; note = thymine
  modified_base 885: mod_base = OTHER; note = thymine
  modified_base 888: mod_base = OTHER; note = thymine
  modified_base 890..891: mod_base = OTHER; note = thymine
  modified_base 894: mod_base = OTHER; note = thymine
  modified_base 897: mod_base = OTHER; note = thymine
  modified_base 900: mod_base = OTHER; note = thymine
  modified_base 906: mod_base = OTHER; note = thymine
  modified_base 909: mod_base = OTHER; note = thymine
  modified_base 912: mod_base = OTHER; note = thymine
  modified_base 914..915: mod_base = OTHER; note = thymine
  modified_base 917: mod_base = OTHER; note = thymine
  modified_base 921: mod_base = OTHER; note = thymine
  modified_base 927..928: mod_base = OTHER; note = thymine
  modified_base 930: mod_base = OTHER; note = thymine
  modified_base 933: mod_base = OTHER; note = thymine
  modified_base 937: mod_base = OTHER; note = thymine
  modified_base 939: mod_base = OTHER; note = thymine
  modified_base 944..945: mod_base = OTHER; note = thymine
  modified_base 948..949: mod_base = OTHER; note = thymine
  modified_base 951: mod_base = OTHER; note = thymine
  modified_base 954: mod_base = OTHER; note = thymine
  modified_base 960: mod_base = OTHER; note = thymine
  modified_base 963: mod_base = OTHER; note = thymine
  modified_base 968..969: mod_base = OTHER; note = thymine
  modified_base 971..972: mod_base = OTHER; note = thymine
  modified_base 975: mod_base = OTHER; note = thymine
  modified_base 977..978: mod_base = OTHER; note = thymine
  modified_base 984: mod_base = OTHER; note = thymine
  modified_base 987: mod_base = OTHER; note = thymine
  modified_base 990..996: mod_base = OTHER; note = thymine
  modified_base 1002: mod_base = OTHER; note = thymine
  modified_base 1004..1005: mod_base = OTHER; note = thymine
  modified_base 1008..1009: mod_base = OTHER; note = thymine
  modified_base 1011: mod_base = OTHER; note = thymine
  modified_base 1014: mod_base = OTHER; note = thymine
  modified_base 1020: mod_base = OTHER; note = thymine
  modified_base 1023: mod_base = OTHER; note = thymine
  modified_base 1026: mod_base = OTHER; note = thymine
  modified_base 1032..1033: mod_base = OTHER; note = thymine
  modified_base 1035: mod_base = OTHER; note = thymine
  modified_base 1038: mod_base = OTHER; note = thymine
  modified_base 1040..1041: mod_base = OTHER; note = thymine
  modified_base 1043: mod_base = OTHER; note = thymine
  modified_base 1049: mod_base = OTHER; note = thymine
  modified_base 1056..1057: mod_base = OTHER; note = thymine
  modified_base 1059: mod_base = OTHER; note = thymine
  modified_base 1062: mod_base = OTHER; note = thymine
  modified_base 1065: mod_base = OTHER; note = thymine
  modified_base 1067..1069: mod_base = OTHER; note = thymine
  modified_base 1071: mod_base = OTHER; note = thymine
  modified_base 1074: mod_base = OTHER; note = thymine
  modified_base 1077: mod_base = OTHER; note = thymine
  modified_base 1079..1080: mod_base = OTHER; note = thymine
  modified_base 1092: mod_base = OTHER; note = thymine
  modified_base 1094..1095: mod_base = OTHER; note = thymine
  modified_base 1101: mod_base = OTHER; note = thymine
  modified_base 1108: mod_base = OTHER; note = thymine
  modified_base 1110: mod_base = OTHER; note = thymine
  modified_base 1113: mod_base = OTHER; note = thymine
  modified_base 1115..1116: mod_base = OTHER; note = thymine
  modified_base 1119: mod_base = OTHER; note = thymine
  modified_base 1121..1123: mod_base = OTHER; note = thymine
  modified_base 1125..1126: mod_base = OTHER; note = thymine
  modified_base 1128: mod_base = OTHER; note = thymine
  modified_base 1133..1134: mod_base = OTHER; note = thymine
  modified_base 1140: mod_base = OTHER; note = thymine
  modified_base 1145..1146: mod_base = OTHER; note = thymine
  modified_base 1149: mod_base = OTHER; note = thymine
  modified_base 1152: mod_base = OTHER; note = thymine
  modified_base 1155..1159: mod_base = OTHER; note = thymine
  modified_base 1161: mod_base = OTHER; note = thymine
  modified_base 1163..1167: mod_base = OTHER; note = thymine
  modified_base 1173: mod_base = OTHER; note = thymine
  modified_base 1176: mod_base = OTHER; note = thymine
  modified_base 1182: mod_base = OTHER; note = thymine
  modified_base 1184..1185: mod_base = OTHER; note = thymine
  modified_base 1188: mod_base = OTHER; note = thymine
  modified_base 1191: mod_base = OTHER; note = thymine
  modified_base 1194: mod_base = OTHER; note = thymine
  modified_base 1196..1197: mod_base = OTHER; note = thymine
  modified_base 1203: mod_base = OTHER; note = thymine
  modified_base 1206: mod_base = OTHER; note = thymine
  modified_base 1208..1209: mod_base = OTHER; note = thymine
  modified_base 1215: mod_base = OTHER; note = thymine
  modified_base 1220..1221: mod_base = OTHER; note = thymine
  modified_base 1223..1224: mod_base = OTHER; note = thymine
  modified_base 1230: mod_base = OTHER; note = thymine
  modified_base 1232..1233: mod_base = OTHER; note = thymine
  modified_base 1235..1236: mod_base = OTHER; note = thymine
  modified_base 1242: mod_base = OTHER; note = thymine
  modified_base 1244..1246: mod_base = OTHER; note = thymine
  modified_base 1248..1251: mod_base = OTHER; note = thymine
  modified_base 1254: mod_base = OTHER; note = thymine
  modified_base 1258..1260: mod_base = OTHER; note = thymine
  modified_base 1262..1263: mod_base = OTHER; note = thymine
  modified_base 1268..1270: mod_base = OTHER; note = thymine
  modified_base 1272: mod_base = OTHER; note = thymine
  modified_base 1274..1275: mod_base = OTHER; note = thymine
  modified_base 1281: mod_base = OTHER; note = thymine
  modified_base 1283..1284: mod_base = OTHER; note = thymine
  modified_base 1287: mod_base = OTHER; note = thymine
  modified_base 1290: mod_base = OTHER; note = thymine
  modified_base 1292..1293: mod_base = OTHER; note = thymine
  modified_base 1295..1296: mod_base = OTHER; note = thymine
  modified_base 1299: mod_base = OTHER; note = thymine
  modified_base 1301..1302: mod_base = OTHER; note = thymine
  modified_base 1304: mod_base = OTHER; note = thymine
  modified_base 1314: mod_base = OTHER; note = thymine
  modified_base 1320..1321: mod_base = OTHER; note = thymine
  modified_base 1323: mod_base = OTHER; note = thymine
  modified_base 1326: mod_base = OTHER; note = thymine
  modified_base 1332..1333: mod_base = OTHER; note = thymine
  modified_base 1335: mod_base = OTHER; note = thymine
  modified_base 1338: mod_base = OTHER; note = thymine
  modified_base 1343..1345: mod_base = OTHER; note = thymine
  modified_base 1347: mod_base = OTHER; note = thymine
  modified_base 1350: mod_base = OTHER; note = thymine
  modified_base 1353: mod_base = OTHER; note = thymine
  modified_base 1356..1357: mod_base = OTHER; note = thymine
  modified_base 1359: mod_base = OTHER; note = thymine
  modified_base 1362: mod_base = OTHER; note = thymine
  modified_base 1371: mod_base = OTHER; note = thymine
  modified_base 1374: mod_base = OTHER; note = thymine
  modified_base 1385..1387: mod_base = OTHER; note = thymine
  modified_base 1389: mod_base = OTHER; note = thymine
  modified_base 1391..1392: mod_base = OTHER; note = thymine
  modified_base 1395: mod_base = OTHER; note = thymine
  modified_base 1398: mod_base = OTHER; note = thymine
  modified_base 1400..1401: mod_base = OTHER; note = thymine
  modified_base 1404: mod_base = OTHER; note = thymine
  modified_base 1407: mod_base = OTHER; note = thymine
  modified_base 1410: mod_base = OTHER; note = thymine
  modified_base 1415..1416: mod_base = OTHER; note = thymine
  modified_base 1419: mod_base = OTHER; note = thymine
  modified_base 1422: mod_base = OTHER; note = thymine
  modified_base 1425: mod_base = OTHER; note = thymine
  modified_base 1427..1428: mod_base = OTHER; note = thymine
  modified_base 1430..1431: mod_base = OTHER; note = thymine
  modified_base 1433..1434: mod_base = OTHER; note = thymine
  modified_base 1437: mod_base = OTHER; note = thymine
  modified_base 1440: mod_base = OTHER; note = thymine
  modified_base 1442..1444: mod_base = OTHER; note = thymine
  modified_base 1446: mod_base = OTHER; note = thymine
  modified_base 1452: mod_base = OTHER; note = thymine
  modified_base 1455: mod_base = OTHER; note = thymine
  modified_base 1460..1461: mod_base = OTHER; note = thymine
  modified_base 1463..1464: mod_base = OTHER; note = thymine
  modified_base 1467: mod_base = OTHER; note = thymine
  modified_base 1470: mod_base = OTHER; note = thymine
  modified_base 1472..1473: mod_base = OTHER; note = thymine
  modified_base 1475..1476: mod_base = OTHER; note = thymine
  modified_base 1479: mod_base = OTHER; note = thymine
  modified_base 1482..1483: mod_base = OTHER; note = thymine
  modified_base 1485: mod_base = OTHER; note = thymine
  modified_base 1488..1489: mod_base = OTHER; note = thymine
  modified_base 1491: mod_base = OTHER; note = thymine
  modified_base 1494: mod_base = OTHER; note = thymine
  modified_base 1497: mod_base = OTHER; note = thymine
  modified_base 1500: mod_base = OTHER; note = thymine
  modified_base 1502..1503: mod_base = OTHER; note = thymine
  modified_base 1506: mod_base = OTHER; note = thymine
  modified_base 1508..1509: mod_base = OTHER; note = thymine
  modified_base 1515: mod_base = OTHER; note = thymine
  modified_base 1518: mod_base = OTHER; note = thymine
  modified_base 1521: mod_base = OTHER; note = thymine
  modified_base 1526..1527: mod_base = OTHER; note = thymine
  modified_base 1530: mod_base = OTHER; note = thymine
  modified_base 1534: mod_base = OTHER; note = thymine
  modified_base 1536..1539: mod_base = OTHER; note = thymine
  modified_base 1545: mod_base = OTHER; note = thymine
  modified_base 1548: mod_base = OTHER; note = thymine
  modified_base 1556..1557: mod_base = OTHER; note = thymine
  modified_base 1566: mod_base = OTHER; note = thymine
  modified_base 1578: mod_base = OTHER; note = thymine
  modified_base 1581: mod_base = OTHER; note = thymine
  modified_base 1587: mod_base = OTHER; note = thymine
  modified_base 1590: mod_base = OTHER; note = thymine
  modified_base 1599: mod_base = OTHER; note = thymine
  modified_base 1602: mod_base = OTHER; note = thymine
  modified_base 1605: mod_base = OTHER; note = thymine
  modified_base 1609..1611: mod_base = OTHER; note = thymine
  modified_base 1614: mod_base = OTHER; note = thymine
  modified_base 1618: mod_base = OTHER; note = thymine
  modified_base 1620..1623: mod_base = OTHER; note = thymine
  modified_base 1626: mod_base = OTHER; note = thymine
  modified_base 1629..1632: mod_base = OTHER; note = thymine
  modified_base 1634..1635: mod_base = OTHER; note = thymine
  modified_base 1638: mod_base = OTHER; note = thymine
  modified_base 1644: mod_base = OTHER; note = thymine
  modified_base 1648: mod_base = OTHER; note = thymine
  modified_base 1650: mod_base = OTHER; note = thymine
  modified_base 1656: mod_base = OTHER; note = thymine
  modified_base 1658..1659: mod_base = OTHER; note = thymine
  modified_base 1661..1662: mod_base = OTHER; note = thymine
  modified_base 1667..1668: mod_base = OTHER; note = thymine
  modified_base 1671: mod_base = OTHER; note = thymine
  modified_base 1673..1675: mod_base = OTHER; note = thymine
  modified_base 1677: mod_base = OTHER; note = thymine
  modified_base 1689: mod_base = OTHER; note = thymine
  modified_base 1692: mod_base = OTHER; note = thymine
  modified_base 1696: mod_base = OTHER; note = thymine
  modified_base 1698: mod_base = OTHER; note = thymine
  modified_base 1700..1702: mod_base = OTHER; note = thymine
  modified_base 1704..1705: mod_base = OTHER; note = thymine
  modified_base 1707: mod_base = OTHER; note = thymine
  modified_base 1710: mod_base = OTHER; note = thymine
  modified_base 1718..1719: mod_base = OTHER; note = thymine
  modified_base 1722: mod_base = OTHER; note = thymine
  modified_base 1724..1725: mod_base = OTHER; note = thymine
  modified_base 1727..1728: mod_base = OTHER; note = thymine
  modified_base 1731: mod_base = OTHER; note = thymine
  modified_base 1733..1734: mod_base = OTHER; note = thymine
  modified_base 1737: mod_base = OTHER; note = thymine
  modified_base 1746..1747: mod_base = OTHER; note = thymine
  modified_base 1749: mod_base = OTHER; note = thymine
  modified_base 1751..1752: mod_base = OTHER; note = thymine
  modified_base 1757..1758: mod_base = OTHER; note = thymine
  modified_base 1761: mod_base = OTHER; note = thymine
  modified_base 1764: mod_base = OTHER; note = thymine
  modified_base 1767: mod_base = OTHER; note = thymine
  modified_base 1769..1770: mod_base = OTHER; note = thymine
  modified_base 1773..1777: mod_base = OTHER; note = thymine
  modified_base 1779: mod_base = OTHER; note = thymine
  modified_base 1782: mod_base = OTHER; note = thymine
  modified_base 1785..1786: mod_base = OTHER; note = thymine
  modified_base 1791: mod_base = OTHER; note = thymine
  modified_base 1794..1795: mod_base = OTHER; note = thymine
  modified_base 1797..1800: mod_base = OTHER; note = thymine
  modified_base 1803: mod_base = OTHER; note = thymine
  modified_base 1806: mod_base = OTHER; note = thymine
  modified_base 1811..1812: mod_base = OTHER; note = thymine
  modified_base 1814..1815: mod_base = OTHER; note = thymine
  modified_base 1817..1818: mod_base = OTHER; note = thymine
  modified_base 1820..1821: mod_base = OTHER; note = thymine
  modified_base 1824..1825: mod_base = OTHER; note = thymine
  modified_base 1827: mod_base = OTHER; note = thymine
  modified_base 1833: mod_base = OTHER; note = thymine
  modified_base 1839: mod_base = OTHER; note = thymine
  modified_base 1845: mod_base = OTHER; note = thymine
  modified_base 1848: mod_base = OTHER; note = thymine
  modified_base 1854: mod_base = OTHER; note = thymine
  modified_base 1857..1858: mod_base = OTHER; note = thymine
  modified_base 1860: mod_base = OTHER; note = thymine
  modified_base 1864: mod_base = OTHER; note = thymine
  modified_base 1866..1869: mod_base = OTHER; note = thymine
  modified_base 1872: mod_base = OTHER; note = thymine
  modified_base 1875: mod_base = OTHER; note = thymine
  modified_base 1881: mod_base = OTHER; note = thymine
  modified_base 1884..1885: mod_base = OTHER; note = thymine
  modified_base 1887: mod_base = OTHER; note = thymine
  modified_base 1890: mod_base = OTHER; note = thymine
  modified_base 1894: mod_base = OTHER; note = thymine
  modified_base 1903..1905: mod_base = OTHER; note = thymine
  modified_base 1911: mod_base = OTHER; note = thymine
  modified_base 1914: mod_base = OTHER; note = thymine
  modified_base 1916..1917: mod_base = OTHER; note = thymine
  modified_base 1923..1924: mod_base = OTHER; note = thymine
  modified_base 1926: mod_base = OTHER; note = thymine
  modified_base 1929..1932: mod_base = OTHER; note = thymine
  modified_base 1935: mod_base = OTHER; note = thymine
  modified_base 1938..1939: mod_base = OTHER; note = thymine
  modified_base 1941: mod_base = OTHER; note = thymine
  modified_base 1953: mod_base = OTHER; note = thymine
  modified_base 1955..1956: mod_base = OTHER; note = thymine
  modified_base 1958..1959: mod_base = OTHER; note = thymine
  modified_base 1961..1962: mod_base = OTHER; note = thymine
  modified_base 1969..1971: mod_base = OTHER; note = thymine
  modified_base 1974: mod_base = OTHER; note = thymine
  modified_base 1980: mod_base = OTHER; note = thymine
  modified_base 1983..1986: mod_base = OTHER; note = thymine
  modified_base 1993: mod_base = OTHER; note = thymine
  modified_base 1995: mod_base = OTHER; note = thymine
  modified_base 1998: mod_base = OTHER; note = thymine
  modified_base 2000..2001: mod_base = OTHER; note = thymine
  modified_base 2004: mod_base = OTHER; note = thymine
  modified_base 2007: mod_base = OTHER; note = thymine
  modified_base 2010: mod_base = OTHER; note = thymine
  modified_base 2013..2014: mod_base = OTHER; note = thymine
  modified_base 2016: mod_base = OTHER; note = thymine
  modified_base 2018..2019: mod_base = OTHER; note = thymine
  modified_base 2022: mod_base = OTHER; note = thymine
  modified_base 2025..2028: mod_base = OTHER; note = thymine
  modified_base 2030..2032: mod_base = OTHER; note = thymine
  modified_base 2034: mod_base = OTHER; note = thymine
  modified_base 2038..2040: mod_base = OTHER; note = thymine
  modified_base 2042..2043: mod_base = OTHER; note = thymine
  modified_base 2046: mod_base = OTHER; note = thymine
  modified_base 2049: mod_base = OTHER; note = thymine
  modified_base 2052: mod_base = OTHER; note = thymine
  modified_base 2054..2055: mod_base = OTHER; note = thymine
  modified_base 2057..2058: mod_base = OTHER; note = thymine
  modified_base 2060..2061: mod_base = OTHER; note = thymine
  modified_base 2064: mod_base = OTHER; note = thymine
  modified_base 2067: mod_base = OTHER; note = thymine
  modified_base 2073: mod_base = OTHER; note = thymine
  modified_base 2079: mod_base = OTHER; note = thymine
  modified_base 2082: mod_base = OTHER; note = thymine
  modified_base 2084..2088: mod_base = OTHER; note = thymine
  modified_base 2091..2092: mod_base = OTHER; note = thymine
  modified_base 2094: mod_base = OTHER; note = thymine
  modified_base 2097: mod_base = OTHER; note = thymine
  modified_base 2100: mod_base = OTHER; note = thymine
  modified_base 2105..2106: mod_base = OTHER; note = thymine
  modified_base 2109: mod_base = OTHER; note = thymine
  modified_base 2112: mod_base = OTHER; note = thymine
  modified_base 2114..2115: mod_base = OTHER; note = thymine
  modified_base 2117..2118: mod_base = OTHER; note = thymine
  modified_base 2121: mod_base = OTHER; note = thymine
  modified_base 2124..2128: mod_base = OTHER; note = thymine
  modified_base 2133: mod_base = OTHER; note = thymine
  modified_base 2135..2136: mod_base = OTHER; note = thymine
  modified_base 2139: mod_base = OTHER; note = thymine
  modified_base 2144..2145: mod_base = OTHER; note = thymine
  modified_base 2148: mod_base = OTHER; note = thymine
  modified_base 2151: mod_base = OTHER; note = thymine
  modified_base 2157: mod_base = OTHER; note = thymine
  modified_base 2160: mod_base = OTHER; note = thymine
  modified_base 2163: mod_base = OTHER; note = thymine
  modified_base 2166: mod_base = OTHER; note = thymine
  modified_base 2169: mod_base = OTHER; note = thymine
  modified_base 2172: mod_base = OTHER; note = thymine
  modified_base 2174..2175: mod_base = OTHER; note = thymine
  modified_base 2178: mod_base = OTHER; note = thymine
  modified_base 2181: mod_base = OTHER; note = thymine
  modified_base 2183..2184: mod_base = OTHER; note = thymine
  modified_base 2186..2187: mod_base = OTHER; note = thymine
  modified_base 2189..2190: mod_base = OTHER; note = thymine
  modified_base 2193..2194: mod_base = OTHER; note = thymine
  modified_base 2196..2197: mod_base = OTHER; note = thymine
  modified_base 2199: mod_base = OTHER; note = thymine
  modified_base 2202: mod_base = OTHER; note = thymine
  modified_base 2204..2205: mod_base = OTHER; note = thymine
  modified_base 2208: mod_base = OTHER; note = thymine
  modified_base 2210: mod_base = OTHER; note = thymine
  modified_base 2222..2223: mod_base = OTHER; note = thymine
  modified_base 2226: mod_base = OTHER; note = thymine
  modified_base 2229..2232: mod_base = OTHER; note = thymine
  modified_base 2234..2235: mod_base = OTHER; note = thymine
  modified_base 2238..2239: mod_base = OTHER; note = thymine
  modified_base 2241: mod_base = OTHER; note = thymine
  modified_base 2249: mod_base = OTHER; note = thymine
  modified_base 2253: mod_base = OTHER; note = thymine
  modified_base 2256..2259: mod_base = OTHER; note = thymine
  modified_base 2262: mod_base = OTHER; note = thymine
  modified_base 2265: mod_base = OTHER; note = thymine
  modified_base 2271: mod_base = OTHER; note = thymine
  modified_base 2273..2274: mod_base = OTHER; note = thymine
  modified_base 2277: mod_base = OTHER; note = thymine
  modified_base 2286: mod_base = OTHER; note = thymine
  modified_base 2289: mod_base = OTHER; note = thymine
  modified_base 2294..2295: mod_base = OTHER; note = thymine
  modified_base 2297..2298: mod_base = OTHER; note = thymine
  modified_base 2301: mod_base = OTHER; note = thymine
  modified_base 2310: mod_base = OTHER; note = thymine
  modified_base 2313..2316: mod_base = OTHER; note = thymine
  modified_base 2319: mod_base = OTHER; note = thymine
  modified_base 2325..2326: mod_base = OTHER; note = thymine
  modified_base 2332..2337: mod_base = OTHER; note = thymine
  modified_base 2340: mod_base = OTHER; note = thymine
  modified_base 2348..2349: mod_base = OTHER; note = thymine
  modified_base 2351: mod_base = OTHER; note = thymine
  modified_base 2354..2355: mod_base = OTHER; note = thymine
  modified_base 2358: mod_base = OTHER; note = thymine
  modified_base 2360..2364: mod_base = OTHER; note = thymine
  modified_base 2367: mod_base = OTHER; note = thymine
  modified_base 2373: mod_base = OTHER; note = thymine
  modified_base 2376: mod_base = OTHER; note = thymine
  modified_base 2379: mod_base = OTHER; note = thymine
  modified_base 2385: mod_base = OTHER; note = thymine
  modified_base 2389..2391: mod_base = OTHER; note = thymine
  modified_base 2400: mod_base = OTHER; note = thymine
  modified_base 2403: mod_base = OTHER; note = thymine
  modified_base 2406: mod_base = OTHER; note = thymine
  modified_base 2409: mod_base = OTHER; note = thymine
  modified_base 2417..2418: mod_base = OTHER; note = thymine
  modified_base 2421: mod_base = OTHER; note = thymine
  modified_base 2424: mod_base = OTHER; note = thymine
  modified_base 2426..2427: mod_base = OTHER; note = thymine
  modified_base 2429..2430: mod_base = OTHER; note = thymine
  modified_base 2433: mod_base = OTHER; note = thymine
  modified_base 2441..2443: mod_base = OTHER; note = thymine
  modified_base 2445..2446: mod_base = OTHER; note = thymine
  modified_base 2448: mod_base = OTHER; note = thymine
  modified_base 2451: mod_base = OTHER; note = thymine
  modified_base 2454: mod_base = OTHER; note = thymine
  modified_base 2460: mod_base = OTHER; note = thymine
  modified_base 2462..2463: mod_base = OTHER; note = thymine
  modified_base 2466: mod_base = OTHER; note = thymine
  modified_base 2470: mod_base = OTHER; note = thymine
  modified_base 2472: mod_base = OTHER; note = thymine
  modified_base 2474..2475: mod_base = OTHER; note = thymine
  modified_base 2478: mod_base = OTHER; note = thymine
  modified_base 2481: mod_base = OTHER; note = thymine
  modified_base 2483..2487: mod_base = OTHER; note = thymine
  modified_base 2489..2491: mod_base = OTHER; note = thymine
  modified_base 2493: mod_base = OTHER; note = thymine
  modified_base 2496: mod_base = OTHER; note = thymine
  modified_base 2499: mod_base = OTHER; note = thymine
  modified_base 2502: mod_base = OTHER; note = thymine
  modified_base 2505: mod_base = OTHER; note = thymine
  modified_base 2508: mod_base = OTHER; note = thymine
  modified_base 2513: mod_base = OTHER; note = thymine
  modified_base 2515: mod_base = OTHER; note = thymine
  modified_base 2517: mod_base = OTHER; note = thymine
  modified_base 2520: mod_base = OTHER; note = thymine
  modified_base 2523: mod_base = OTHER; note = thymine
  modified_base 2526: mod_base = OTHER; note = thymine
  modified_base 2532: mod_base = OTHER; note = thymine
  modified_base 2535: mod_base = OTHER; note = thymine
  modified_base 2537..2538: mod_base = OTHER; note = thymine
  modified_base 2541..2542: mod_base = OTHER; note = thymine
  modified_base 2544: mod_base = OTHER; note = thymine
  modified_base 2547: mod_base = OTHER; note = thymine
  modified_base 2553..2556: mod_base = OTHER; note = thymine
  modified_base 2558..2559: mod_base = OTHER; note = thymine
  modified_base 2565: mod_base = OTHER; note = thymine
  modified_base 2568: mod_base = OTHER; note = thymine
  modified_base 2576..2578: mod_base = OTHER; note = thymine
  modified_base 2580: mod_base = OTHER; note = thymine
  modified_base 2582..2583: mod_base = OTHER; note = thymine
  modified_base 2589: mod_base = OTHER; note = thymine
  modified_base 2591..2593: mod_base = OTHER; note = thymine
  modified_base 2597..2598: mod_base = OTHER; note = thymine
  modified_base 2601: mod_base = OTHER; note = thymine
  modified_base 2606..2607: mod_base = OTHER; note = thymine
  modified_base 2612..2613: mod_base = OTHER; note = thymine
  modified_base 2616: mod_base = OTHER; note = thymine
  modified_base 2619: mod_base = OTHER; note = thymine
  modified_base 2621..2622: mod_base = OTHER; note = thymine
  modified_base 2628: mod_base = OTHER; note = thymine
  modified_base 2630: mod_base = OTHER; note = thymine
  modified_base 2633..2634: mod_base = OTHER; note = thymine
  modified_base 2637..2638: mod_base = OTHER; note = thymine
  modified_base 2640: mod_base = OTHER; note = thymine
  modified_base 2646: mod_base = OTHER; note = thymine
  modified_base 2649: mod_base = OTHER; note = thymine
  modified_base 2652: mod_base = OTHER; note = thymine
  modified_base 2657..2658: mod_base = OTHER; note = thymine
  modified_base 2663..2665: mod_base = OTHER; note = thymine
  modified_base 2667: mod_base = OTHER; note = thymine
  modified_base 2673: mod_base = OTHER; note = thymine
  modified_base 2675..2676: mod_base = OTHER; note = thymine
  modified_base 2682: mod_base = OTHER; note = thymine
  modified_base 2685: mod_base = OTHER; note = thymine
  modified_base 2687..2688: mod_base = OTHER; note = thymine
  modified_base 2694..2695: mod_base = OTHER; note = thymine
  modified_base 2697: mod_base = OTHER; note = thymine
  modified_base 2700: mod_base = OTHER; note = thymine
  modified_base 2703: mod_base = OTHER; note = thymine
  modified_base 2706: mod_base = OTHER; note = thymine
  modified_base 2709: mod_base = OTHER; note = thymine
  modified_base 2718..2721: mod_base = OTHER; note = thymine
  modified_base 2724: mod_base = OTHER; note = thymine
  modified_base 2727: mod_base = OTHER; note = thymine
  modified_base 2733: mod_base = OTHER; note = thymine
  modified_base 2736: mod_base = OTHER; note = thymine
  modified_base 2739..2743: mod_base = OTHER; note = thymine
  modified_base 2745: mod_base = OTHER; note = thymine
  modified_base 2754: mod_base = OTHER; note = thymine
  modified_base 2757: mod_base = OTHER; note = thymine
  modified_base 2762..2763: mod_base = OTHER; note = thymine
  modified_base 2765..2766: mod_base = OTHER; note = thymine
  modified_base 2772: mod_base = OTHER; note = thymine
  modified_base 2774..2775: mod_base = OTHER; note = thymine
  modified_base 2778: mod_base = OTHER; note = thymine
  modified_base 2780..2781: mod_base = OTHER; note = thymine
  modified_base 2790: mod_base = OTHER; note = thymine
  modified_base 2797: mod_base = OTHER; note = thymine
  modified_base 2799: mod_base = OTHER; note = thymine
  modified_base 2802: mod_base = OTHER; note = thymine
  modified_base 2804..2805: mod_base = OTHER; note = thymine
  modified_base 2807..2808: mod_base = OTHER; note = thymine
  modified_base 2810..2811: mod_base = OTHER; note = thymine
  modified_base 2814: mod_base = OTHER; note = thymine
  modified_base 2823: mod_base = OTHER; note = thymine
  modified_base 2826..2827: mod_base = OTHER; note = thymine
  modified_base 2829: mod_base = OTHER; note = thymine
  modified_base 2832: mod_base = OTHER; note = thymine
  modified_base 2834..2835: mod_base = OTHER; note = thymine
  modified_base 2838: mod_base = OTHER; note = thymine
  modified_base 2841: mod_base = OTHER; note = thymine
  modified_base 2844: mod_base = OTHER; note = thymine
  modified_base 2847: mod_base = OTHER; note = thymine
  modified_base 2850: mod_base = OTHER; note = thymine
  modified_base 2852: mod_base = OTHER; note = thymine
  modified_base 2855..2856: mod_base = OTHER; note = thymine
  modified_base 2859: mod_base = OTHER; note = thymine
  modified_base 2861..2862: mod_base = OTHER; note = thymine
  modified_base 2865: mod_base = OTHER; note = thymine
  modified_base 2867..2872: mod_base = OTHER; note = thymine
  modified_base 2874: mod_base = OTHER; note = thymine
  modified_base 2879..2880: mod_base = OTHER; note = thymine
  modified_base 2883: mod_base = OTHER; note = thymine
  modified_base 2892: mod_base = OTHER; note = thymine
  modified_base 2898: mod_base = OTHER; note = thymine
  modified_base 2902: mod_base = OTHER; note = thymine
  modified_base 2904..2907: mod_base = OTHER; note = thymine
  modified_base 2909..2910: mod_base = OTHER; note = thymine
  modified_base 2912..2913: mod_base = OTHER; note = thymine
  modified_base 2916: mod_base = OTHER; note = thymine
  modified_base 2918..2920: mod_base = OTHER; note = thymine
  modified_base 2922: mod_base = OTHER; note = thymine
  modified_base 2925..2926: mod_base = OTHER; note = thymine
  modified_base 2933..2934: mod_base = OTHER; note = thymine
  modified_base 2937: mod_base = OTHER; note = thymine
  modified_base 2943: mod_base = OTHER; note = thymine
  modified_base 2945..2946: mod_base = OTHER; note = thymine
  modified_base 2948..2949: mod_base = OTHER; note = thymine
  modified_base 2952: mod_base = OTHER; note = thymine
  modified_base 2955: mod_base = OTHER; note = thymine
  modified_base 2957..2958: mod_base = OTHER; note = thymine
  modified_base 2961..2962: mod_base = OTHER; note = thymine
  modified_base 2964: mod_base = OTHER; note = thymine
  modified_base 2970..2971: mod_base = OTHER; note = thymine
  modified_base 2973: mod_base = OTHER; note = thymine
  modified_base 2976: mod_base = OTHER; note = thymine
  modified_base 2978..2979: mod_base = OTHER; note = thymine
  modified_base 2982: mod_base = OTHER; note = thymine
  modified_base 2985..2986: mod_base = OTHER; note = thymine
  modified_base 2988..2989: mod_base = OTHER; note = thymine
  modified_base 2991: mod_base = OTHER; note = thymine
  modified_base 2994..2998: mod_base = OTHER; note = thymine
  modified_base 3000..3004: mod_base = OTHER; note = thymine
  modified_base 3006: mod_base = OTHER; note = thymine
  modified_base 3008..3009: mod_base = OTHER; note = thymine
  modified_base 3012: mod_base = OTHER; note = thymine
  modified_base 3016: mod_base = OTHER; note = thymine
  modified_base 3018: mod_base = OTHER; note = thymine
  modified_base 3021: mod_base = OTHER; note = thymine
  modified_base 3023..3024: mod_base = OTHER; note = thymine
  modified_base 3026..3027: mod_base = OTHER; note = thymine
  modified_base 3030..3033: mod_base = OTHER; note = thymine
  modified_base 3042: mod_base = OTHER; note = thymine
  modified_base 3049: mod_base = OTHER; note = thymine
  modified_base 3051: mod_base = OTHER; note = thymine
  modified_base 3056..3057: mod_base = OTHER; note = thymine
  modified_base 3061..3063: mod_base = OTHER; note = thymine
  modified_base 3066..3067: mod_base = OTHER; note = thymine
  modified_base 3069..3070: mod_base = OTHER; note = thymine
  modified_base 3072: mod_base = OTHER; note = thymine
  modified_base 3074..3075: mod_base = OTHER; note = thymine
  modified_base 3078..3079: mod_base = OTHER; note = thymine
  modified_base 3081: mod_base = OTHER; note = thymine
  modified_base 3084..3085: mod_base = OTHER; note = thymine
  modified_base 3087..3088: mod_base = OTHER; note = thymine
  modified_base 3090: mod_base = OTHER; note = thymine
  modified_base 3093: mod_base = OTHER; note = thymine
  modified_base 3096: mod_base = OTHER; note = thymine
  modified_base 3099..3103: mod_base = OTHER; note = thymine
  modified_base 3105: mod_base = OTHER; note = thymine
  modified_base 3107..3108: mod_base = OTHER; note = thymine
  modified_base 3111..3112: mod_base = OTHER; note = thymine
  modified_base 3117: mod_base = OTHER; note = thymine
  modified_base 3120: mod_base = OTHER; note = thymine
  modified_base 3126..3127: mod_base = OTHER; note = thymine
  modified_base 3129: mod_base = OTHER; note = thymine
  modified_base 3142..3144: mod_base = OTHER; note = thymine
  modified_base 3147: mod_base = OTHER; note = thymine
  modified_base 3149..3151: mod_base = OTHER; note = thymine
  modified_base 3153: mod_base = OTHER; note = thymine
  modified_base 3156: mod_base = OTHER; note = thymine
  modified_base 3162: mod_base = OTHER; note = thymine
  modified_base 3164..3165: mod_base = OTHER; note = thymine
  modified_base 3167..3168: mod_base = OTHER; note = thymine
  modified_base 3170..3171: mod_base = OTHER; note = thymine
  modified_base 3173..3174: mod_base = OTHER; note = thymine
  modified_base 3181: mod_base = OTHER; note = thymine
  modified_base 3183: mod_base = OTHER; note = thymine
  modified_base 3188..3189: mod_base = OTHER; note = thymine
  modified_base 3192: mod_base = OTHER; note = thymine
  modified_base 3197..3198: mod_base = OTHER; note = thymine
  modified_base 3201: mod_base = OTHER; note = thymine
  modified_base 3209..3210: mod_base = OTHER; note = thymine
  modified_base 3213: mod_base = OTHER; note = thymine
  modified_base 3216..3217: mod_base = OTHER; note = thymine
  modified_base 3219: mod_base = OTHER; note = thymine
  modified_base 3222: mod_base = OTHER; note = thymine
  modified_base 3224..3225: mod_base = OTHER; note = thymine
  modified_base 3234: mod_base = OTHER; note = thymine
  modified_base 3237: mod_base = OTHER; note = thymine
  modified_base 3240: mod_base = OTHER; note = thymine
  modified_base 3242..3243: mod_base = OTHER; note = thymine
  modified_base 3246: mod_base = OTHER; note = thymine
  misc_feature 1..3249: note = Synthetic
  source 1..3249: mol_type = other RNA
atggctgcttttaagcctaatcctattaattatattcttggtcttgatattggtattgcttctgttggttgggctatggttgagattgatgaggaggagaatcctattcgtcttattgatcttggtgttcgtgtttttgagcgtgctgaggttcctaagactggtgattctcttgctatggctcgtcgtcttgctcgttctgttcgtcgtcttactcgtcgtcgtgctcatcgtcttcttcgtgctcgtcgtcttcttaagcgtgagggtgttcttcaggctgctgattttgatgagaatggtcttattaagtctcttcctaatactccttggcagcttcgtgctgctgctcttgatcgtaagcttactcctcttgagtggtctgctgttcttcttcatcttattaagcatcgtggttatctttctcagcgtaagaatgagggtgagactgctgataaggagcttggtgctcttcttaagggtgttgctaataatgctcatgctcttcagactggtgattttcgtactcctgctgagcttgctcttaataagtttgagaaggagtctggtcatattcgtaatcagcgtggtgattattctcatactttttctcgtaaggatcttcaggctgagcttattcttctttttgagaagcagaaggagtttggtaatcctcatgtttctggtggtcttaaggagggtattgagactcttcttatgactcagcgtcctgctctttctggtgatgctgttcagaagatgcttggtcattgtacttttgagcctgctgagcctaaggctgctaagaatacttatactgctgagcgttttatttggcttactaagcttaataatcttcgtattcttgagcagggttctgagcgtcctcttactgatactgagcgtgctactcttatggatgagccttatcgtaagtctaagcttacttatgctcaggctcgtaagcttcttggtcttgaggatactgctttttttaagggtcttcgttatggtaaggataatgctgaggcttctactcttatggagatgaaggcttatcatgctatttctcgtgctcttgagaaggagggtcttaaggataagaagtctcctcttaatctttcttctgagcttcaggatgagattggtactgctttttctctttttaagactgatgaggatattactggtcgtcttaaggatcgtgttcagcctgagattcttgaggctcttcttaagcatatttcttttgataagtttgttcagatttctcttaaggctcttcgtcgtattgttcctcttatggagcagggtaagcgttatgatgaggcttgtgctgagatttatggtgatcattatggtaagaagaatactgaggagaagatttatcttcctcctattcctgctgatgagattcgtaatcctgttgttcttcgtgctctttctcaggctcgtaaggttattaatggtgttgttcgtcgttatggttctcctgctcgtattcatattgagactgctcgtgaggttggtaagtcttttaaggatcgtaaggagattgagaagcgtcaggaggagaatcgtaaggatcgtgagaaggctgctgctaagtttcgtgagtattttcctaattttgttggtgagcctaagtctaaggatattcttaagcttcgtctttatgagcagcagcatggtaagtgtctttattctggtaaggagattaatcttgttcgtcttaatgagaagggttatgttgagattgatgctgctcttcctttttctcgtacttgggatgattcttttaataataaggttcttgttcttggttctgagaatcagaataagggtaatcagactccttatgagtattttaatggtaaggataattctcgtgagtggcaggagtttaaggctcgtgttgagacttctcgttttcctcgttctaagaagcagcgtattcttcttcagaagtttgatgaggatggttttaaggagtgtaatcttaatgatactcgttatgttaatcgttttctttgtcagtttgttgctgatcatattcttcttactggtaagggtaagcgtcgtgtttttgcttctaatggtcagattactaatcttcttcgtggtttttggggtcttcgtaaggttcgtgctgagaatgatcgtcatcatgctcttgatgctgttgttgttgcttgttctactgttgctatgcagcagaagattactcgttttgttcgttataaggagatgaatgcttttgatggtaagactattgataaggagactggtaaggttcttcatcagaagactcattttcctcagccttgggagttttttgctcaggaggttatgattcgtgtttttggtaagcctgatggtaagcctgagtttgaggaggctgatactcctgagaagcttcgtactcttcttgctgagaagctttcttctcgtcctgaggctgttcatgagtatgttactcctctttttgtttctcgtgctcctaatcgtaagatgtctggtgctcataaggatactcttcgttctgctaagcgttttgttaagcataatgagaagatttctgttaagcgtgtttggcttactgagattaagcttgctgatcttgagaatatggttaattataagaatggtcgtgagattgagctttatgaggctcttaaggctcgtcttgaggcttatggtggtaatgctaagcaggcttttgatcctaaggataatcctttttataagaagggtggtcagcttgttaaggctgttcgtgttgagaagactcaggagtctggtgttcttcttaataagaagaatgcttatactattgctgataatggtgatatggttcgtgttgatgttttttgtaaggttgataagaagggtaagaatcagtattttattgttcctatttatgcttggcaggttgctgagaatattcttcctgatattgattgtaagggttatcgtattgatgattcttatactttttgtttttctcttcataagtatgatcttattgcttttcagaaggatgagaagtctaaggttgagtttgcttattatattaattgtgattcttctaatggtcgtttttatcttgcttggcatgataagggttctaaggagcagcagtttcgtatttctactcagaatcttgttcttattcagaagtatcaggttaatgagcttggtaaggagattcgtccttgtcgtcttaagaagcgtcctcctgttcgttga

SEQ ID NO: 274 - RNA, 3249 nt, synthetic construct
  modified_base 2: mod_base = OTHER; note = thymine
  modified_base 10..11: mod_base = OTHER; note = thymine
  modified_base 26: mod_base = OTHER; note = thymine
  modified_base 31: mod_base = OTHER; note = thymine
  modified_base 35: mod_base = OTHER; note = thymine
  modified_base 38: mod_base = OTHER; note = thymine
  modified_base 44: mod_base = OTHER; note = thymine
  modified_base 50: mod_base = OTHER; note = thymine
  modified_base 56: mod_base = OTHER; note = thymine
  modified_base 61: mod_base = OTHER; note = thymine
  modified_base 65: mod_base = OTHER; note = thymine
  modified_base 70: mod_base = OTHER; note = thymine
  modified_base 77: mod_base = OTHER; note = thymine
  modified_base 80: mod_base = OTHER; note = thymine
  modified_base 86: mod_base = OTHER; note = thymine
  modified_base 107: mod_base = OTHER; note = thymine
  modified_base 113: mod_base = OTHER; note = thymine
  modified_base 116: mod_base = OTHER; note = thymine
  modified_base 122: mod_base = OTHER; note = thymine
  modified_base 128: mod_base = OTHER; note = thymine
  modified_base 134: mod_base = OTHER; note = thymine
  modified_base 136..137: mod_base = OTHER; note = thymine
  modified_base 152: mod_base = OTHER; note = thymine
  modified_base 169: mod_base = OTHER; note = thymine
  modified_base 173: mod_base = OTHER; note = thymine
  modified_base 179: mod_base = OTHER; note = thymine
  modified_base 191: mod_base = OTHER; note = thymine
  modified_base 199: mod_base = OTHER; note = thymine
  modified_base 203: mod_base = OTHER; note = thymine
  modified_base 212: mod_base = OTHER; note = thymine
  modified_base 236: mod_base = OTHER; note = thymine
  modified_base 239: mod_base = OTHER; note = thymine
  modified_base 254: mod_base = OTHER; note = thymine
  modified_base 257: mod_base = OTHER; note = thymine
  modified_base 272: mod_base = OTHER; note = thymine
  modified_base 275: mod_base = OTHER; note = thymine
  modified_base 289..290: mod_base = OTHER; note = thymine
  modified_base 305: mod_base = OTHER; note = thymine
  modified_base 308: mod_base = OTHER; note = thymine
  modified_base 313: mod_base = OTHER; note = thymine
  modified_base 317: mod_base = OTHER; note = thymine
  modified_base 331: mod_base = OTHER; note = thymine
  modified_base 338: mod_base = OTHER; note = thymine
  modified_base 353: mod_base = OTHER; note = thymine
  modified_base 365: mod_base = OTHER; note = thymine
  modified_base 374: mod_base = OTHER; note = thymine
  modified_base 379: mod_base = OTHER; note = thymine
  modified_base 382: mod_base = OTHER; note = thymine
  modified_base 389: mod_base = OTHER; note = thymine
  modified_base 392: mod_base = OTHER; note = thymine
  modified_base 395: mod_base = OTHER; note = thymine
  modified_base 401: mod_base = OTHER; note = thymine
  modified_base 404: mod_base = OTHER; note = thymine
  modified_base 418: mod_base = OTHER; note = thymine
  modified_base 422: mod_base = OTHER; note = thymine
  modified_base 424: mod_base = OTHER; note = thymine
  modified_base 464: mod_base = OTHER; note = thymine
  modified_base 473: mod_base = OTHER; note = thymine
  modified_base 476: mod_base = OTHER; note = thymine
  modified_base 485: mod_base = OTHER; note = thymine
  modified_base 506: mod_base = OTHER; note = thymine
  modified_base 520..521: mod_base = OTHER; note = thymine
  modified_base 539: mod_base = OTHER; note = thymine
  modified_base 545: mod_base = OTHER; note = thymine
  modified_base 553..554: mod_base = OTHER; note = thymine
  modified_base 565: mod_base = OTHER; note = thymine
  modified_base 575: mod_base = OTHER; note = thymine
  modified_base 595: mod_base = OTHER; note = thymine
  modified_base 598: mod_base = OTHER; note = thymine
  modified_base 607..608: mod_base = OTHER; note = thymine
  modified_base 610: mod_base = OTHER; note = thymine
  modified_base 623: mod_base = OTHER; note = thymine
  modified_base 635: mod_base = OTHER; note = thymine
  modified_base 638: mod_base = OTHER; note = thymine
  modified_base 641: mod_base = OTHER; note = thymine
  modified_base 644: mod_base = OTHER; note = thymine
  modified_base 646..647: mod_base = OTHER; note = thymine
  modified_base 664..665: mod_base = OTHER; note = thymine
  modified_base 680: mod_base = OTHER; note = thymine
  modified_base 682: mod_base = OTHER; note = thymine
  modified_base 692: mod_base = OTHER; note = thymine
  modified_base 704: mod_base = OTHER; note = thymine
  modified_base 713: mod_base = OTHER; note = thymine
  modified_base 716: mod_base = OTHER; note = thymine
  modified_base 719: mod_base = OTHER; note = thymine
  modified_base 737: mod_base = OTHER; note = thymine
  modified_base 739: mod_base = OTHER; note = thymine
  modified_base 752: mod_base = OTHER; note = thymine
  modified_base 761: mod_base = OTHER; note = thymine
  modified_base 764: mod_base = OTHER; note = thymine
  modified_base 772: mod_base = OTHER; note = thymine
  modified_base 778..779: mod_base = OTHER; note = thymine
  modified_base 814: mod_base = OTHER; note = thymine
  modified_base 829..830: mod_base = OTHER; note = thymine
  modified_base 833: mod_base = OTHER; note = thymine
  modified_base 835: mod_base = OTHER; note = thymine
  modified_base 839: mod_base = OTHER; note = thymine
  modified_base 848: mod_base = OTHER; note = thymine
  modified_base 857: mod_base = OTHER; note = thymine
  modified_base 863: mod_base = OTHER; note = thymine
  modified_base 866: mod_base = OTHER; note = thymine
  modified_base 877: mod_base = OTHER; note = thymine
  modified_base 890: mod_base = OTHER; note = thymine
  modified_base 914: mod_base = OTHER; note = thymine
  modified_base 917: mod_base = OTHER; note = thymine
  modified_base 928: mod_base = OTHER; note = thymine
  modified_base 937: mod_base = OTHER; note = thymine
  modified_base 944: mod_base = OTHER; note = thymine
  modified_base 949: mod_base = OTHER; note = thymine
  modified_base 968: mod_base = OTHER; note = thymine
  modified_base 971: mod_base = OTHER; note = thymine
  modified_base 977: mod_base = OTHER; note = thymine
  modified_base 991..992: mod_base = OTHER; note = thymine
  modified_base 994..995: mod_base = OTHER; note = thymine
  modified_base 1004: mod_base = OTHER; note = thymine
  modified_base 1009: mod_base = OTHER; note = thymine
  modified_base 1033: mod_base = OTHER; note = thymine
  modified_base 1040: mod_base = OTHER; note = thymine
  modified_base 1043: mod_base = OTHER; note = thymine
  modified_base 1049: mod_base = OTHER; note = thymine
  modified_base 1057: mod_base = OTHER; note = thymine
  modified_base 1067: mod_base = OTHER; note = thymine
  modified_base 1069: mod_base = OTHER; note = thymine
  modified_base 1079: mod_base = OTHER; note = thymine
  modified_base 1094: mod_base = OTHER; note = thymine
  modified_base 1108: mod_base = OTHER; note = thymine
  modified_base 1115: mod_base = OTHER; note = thymine
  modified_base 1121: mod_base = OTHER; note = thymine
  modified_base 1123: mod_base = OTHER; note = thymine
  modified_base 1126: mod_base = OTHER; note = thymine
  modified_base 1133: mod_base = OTHER; note = thymine
  modified_base 1145: mod_base = OTHER; note = thymine
  modified_base 1156..1157: mod_base = OTHER; note = thymine
  modified_base 1159: mod_base = OTHER; note = thymine
  modified_base 1163: mod_base = OTHER; note = thymine
  modified_base 1165..1166: mod_base = OTHER; note = thymine
  modified_base 1184: mod_base = OTHER; note = thymine
  modified_base 1196: mod_base = OTHER; note = thymine
  modified_base 1208: mod_base = OTHER; note = thymine
  modified_base 1220: mod_base = OTHER; note = thymine
  modified_base 1223: mod_base = OTHER; note = thymine
  modified_base 1232: mod_base = OTHER; note = thymine
  modified_base 1235: mod_base = OTHER; note = thymine
  modified_base 1244: mod_base = OTHER; note = thymine
  modified_base 1246: mod_base = OTHER; note = thymine
  modified_base 1249..1250: mod_base = OTHER; note = thymine
  modified_base 1258..1259: mod_base = OTHER; note = thymine
  modified_base 1262: mod_base = OTHER; note = thymine
  modified_base 1268: mod_base = OTHER; note = thymine
  modified_base 1270: mod_base = OTHER; note = thymine
  modified_base 1274: mod_base = OTHER; note = thymine
  modified_base 1283: mod_base = OTHER; note = thymine
  modified_base 1292: mod_base = OTHER; note = thymine
  modified_base 1295: mod_base = OTHER; note = thymine
  modified_base 1301: mod_base = OTHER; note = thymine
  modified_base 1304: mod_base = OTHER; note = thymine
  modified_base 1321: mod_base = OTHER; note = thymine
  modified_base 1333: mod_base = OTHER; note = thymine
  modified_base 1343: mod_base = OTHER; note = thymine
  modified_base 1345: mod_base = OTHER; note = thymine
  modified_base 1357: mod_base = OTHER; note = thymine
  modified_base 1385: mod_base = OTHER; note = thymine
  modified_base 1387: mod_base = OTHER; note = thymine
  modified_base 1391: mod_base = OTHER; note = thymine
  modified_base 1400: mod_base = OTHER; note = thymine
  modified_base 1415: mod_base = OTHER; note = thymine
  modified_base 1427: mod_base = OTHER; note = thymine
  modified_base 1430: mod_base = OTHER; note = thymine
  modified_base 1433: mod_base = OTHER; note = thymine
  modified_base 1442: mod_base = OTHER; note = thymine
  modified_base 1444: mod_base = OTHER; note = thymine
  modified_base 1460: mod_base = OTHER; note = thymine
  modified_base 1463: mod_base = OTHER; note = thymine
  modified_base 1472: mod_base = OTHER; note = thymine
  modified_base 1475: mod_base = OTHER; note = thymine
  modified_base 1483: mod_base = OTHER; note = thymine
  modified_base 1489: mod_base = OTHER; note = thymine
  modified_base 1502: mod_base = OTHER; note = thymine
  modified_base 1508: mod_base = OTHER; note = thymine
  modified_base 1526: mod_base = OTHER; note = thymine
  modified_base 1534: mod_base = OTHER; note = thymine
  modified_base 1537..1538: mod_base = OTHER; note = thymine
  modified_base 1556: mod_base = OTHER; note = thymine
  modified_base 1609..1610: mod_base = OTHER; note = thymine
  modified_base 1618: mod_base = OTHER; note = thymine
  modified_base 1621..1622: mod_base = OTHER; note = thymine
  modified_base 1630..1631: mod_base = OTHER; note = thymine
  modified_base 1634: mod_base = OTHER; note = thymine
  modified_base 1648: mod_base = OTHER; note = thymine
  modified_base 1658: mod_base = OTHER; note = thymine
  modified_base 1661: mod_base = OTHER; note = thymine
  modified_base 1667: mod_base = OTHER; note = thymine
  modified_base 1673: mod_base = OTHER; note = thymine
  modified_base 1675: mod_base = OTHER; note = thymine
  modified_base 1696: mod_base = OTHER; note = thymine
  modified_base 1700: mod_base = OTHER; note = thymine
  modified_base 1702: mod_base = OTHER; note = thymine
  modified_base 1705: mod_base = OTHER; note = thymine
  modified_base 1718: mod_base = OTHER; note = thymine
  modified_base 1724: mod_base = OTHER; note = thymine
  modified_base 1727: mod_base = OTHER; note = thymine
  modified_base 1733: mod_base = OTHER; note = thymine
  modified_base 1747: mod_base = OTHER; note = thymine
  modified_base 1751: mod_base = OTHER; note = thymine
  modified_base 1757: mod_base = OTHER; note = thymine
  modified_base 1769: mod_base = OTHER; note = thymine
  modified_base 1774..1775: mod_base = OTHER; note = thymine
  modified_base 1777: mod_base = OTHER; note = thymine
  modified_base 1786: mod_base = OTHER; note = thymine
  modified_base 1795: mod_base = OTHER; note = thymine
  modified_base 1798..1799: mod_base = OTHER; note = thymine
  modified_base 1811: mod_base = OTHER; note = thymine
  modified_base 1814: mod_base = OTHER; note = thymine
  modified_base 1817: mod_base = OTHER; note = thymine
  modified_base 1820: mod_base = OTHER; note = thymine
  modified_base 1825: mod_base = OTHER; note = thymine
  modified_base 1858: mod_base = OTHER; note = thymine
  modified_base 1864: mod_base = OTHER; note = thymine
  modified_base 1867..1868: mod_base = OTHER; note = thymine
  modified_base 1885: mod_base = OTHER; note = thymine
  modified_base 1894: mod_base = OTHER; note = thymine
  modified_base 1903..1904: mod_base = OTHER; note = thymine
  modified_base 1916: mod_base = OTHER; note = thymine
  modified_base 1924: mod_base = OTHER; note = thymine
  modified_base 1930..1931: mod_base = OTHER; note = thymine
  modified_base 1939: mod_base = OTHER; note = thymine
  modified_base 1955: mod_base = OTHER; note = thymine
  modified_base 1958: mod_base = OTHER; note = thymine
  modified_base 1961: mod_base = OTHER; note = thymine
  modified_base 1969..1970: mod_base = OTHER; note = thymine
  modified_base 1984..1985: mod_base = OTHER; note = thymine
  modified_base 1993: mod_base = OTHER; note = thymine
  modified_base 2000: mod_base = OTHER; note = thymine
  modified_base 2014: mod_base = OTHER; note = thymine
  modified_base 2018: mod_base = OTHER; note = thymine
  modified_base 2026..2027: mod_base = OTHER; note = thymine
  modified_base 2030: mod_base = OTHER; note = thymine
  modified_base 2032: mod_base = OTHER; note = thymine
  modified_base 2038..2039: mod_base = OTHER; note = thymine
  modified_base 2042: mod_base = OTHER; note = thymine
  modified_base 2054: mod_base = OTHER; note = thymine
  modified_base 2057: mod_base = OTHER; note = thymine
  modified_base 2060: mod_base = OTHER; note = thymine
  modified_base 2084: mod_base = OTHER; note = thymine
  modified_base 2086..2087: mod_base = OTHER; note = thymine
  modified_base 2092: mod_base = OTHER; note = thymine
  modified_base 2105: mod_base = OTHER; note = thymine
  modified_base 2114: mod_base = OTHER; note = thymine
  modified_base 2117: mod_base = OTHER; note = thymine
  modified_base 2125..2126: mod_base = OTHER; note = thymine
  modified_base 2128: mod_base = OTHER; note = thymine
  modified_base 2135: mod_base = OTHER; note = thymine
  modified_base 2144: mod_base = OTHER; note = thymine
  modified_base 2174: mod_base = OTHER; note = thymine
  modified_base 2183: mod_base = OTHER; note = thymine
  modified_base 2186: mod_base = OTHER; note = thymine
  modified_base 2189: mod_base = OTHER; note = thymine
  modified_base 2194: mod_base = OTHER; note = thymine
  modified_base 2197: mod_base = OTHER; note = thymine
  modified_base 2204: mod_base = OTHER; note = thymine
  modified_base 2210: mod_base = OTHER; note = thymine
  modified_base 2222: mod_base = OTHER; note = thymine
  modified_base 2230..2231: mod_base = OTHER; note = thymine
  modified_base 2234: mod_base = OTHER; note = thymine
  modified_base 2239: mod_base = OTHER; note = thymine
  modified_base 2249: mod_base = OTHER; note = thymine
  modified_base 2257..2258: mod_base = OTHER; note = thymine
  modified_base 2273: mod_base = OTHER; note = thymine
  modified_base 2294: mod_base = OTHER; note = thymine
  modified_base 2297: mod_base = OTHER; note = thymine
  modified_base 2314..2315: mod_base = OTHER; note = thymine
  modified_base 2326: mod_base = OTHER; note = thymine
  modified_base 2332..2333: mod_base = OTHER; note = thymine
  modified_base 2335..2336: mod_base = OTHER; note = thymine
  modified_base 2348: mod_base = OTHER; note = thymine
  modified_base 2351: mod_base = OTHER; note = thymine
  modified_base 2354: mod_base = OTHER; note = thymine
  modified_base 2360: mod_base = OTHER; note = thymine
  modified_base 2362..2363: mod_base = OTHER; note = thymine
  modified_base 2389..2390: mod_base = OTHER; note = thymine
  modified_base 2417: mod_base = OTHER; note = thymine
  modified_base 2426: mod_base = OTHER; note = thymine
  modified_base 2429: mod_base = OTHER; note = thymine
  modified_base 2441: mod_base = OTHER; note = thymine
  modified_base 2443: mod_base = OTHER; note = thymine
  modified_base 2446: mod_base = OTHER; note = thymine
  modified_base 2462: mod_base = OTHER; note = thymine
  modified_base 2470: mod_base = OTHER; note = thymine
  modified_base 2474: mod_base = OTHER; note = thymine
  modified_base 2483: mod_base = OTHER; note = thymine
  modified_base 2485..2486: mod_base = OTHER; note = thymine
  modified_base 2489: mod_base = OTHER; note = thymine
  modified_base 2491: mod_base = OTHER; note = thymine
  modified_base 2513: mod_base = OTHER; note = thymine
  modified_base 2515: mod_base = OTHER; note = thymine
  modified_base 2537: mod_base = OTHER; note = thymine
  modified_base 2542: mod_base = OTHER; note = thymine
  modified_base 2554..2555: mod_base = OTHER; note = thymine
  modified_base 2558: mod_base = OTHER; note = thymine
  modified_base 2576: mod_base = OTHER; note = thymine
  modified_base 2578: mod_base = OTHER; note = thymine
  modified_base 2582: mod_base = OTHER; note = thymine
  modified_base 2591: mod_base = OTHER; note = thymine
  modified_base 2593: mod_base = OTHER; note = thymine
  modified_base 2597: mod_base = OTHER; note = thymine
  modified_base 2606: mod_base = OTHER; note = thymine
  modified_base 2612: mod_base = OTHER; note = thymine
  modified_base 2621: mod_base = OTHER; note = thymine
  modified_base 2630: mod_base = OTHER; note = thymine
  modified_base 2633: mod_base = OTHER; note = thymine
  modified_base 2638: mod_base = OTHER; note = thymine
  modified_base 2657: mod_base = OTHER; note = thymine
  modified_base 2663: mod_base = OTHER; note = thymine
  modified_base 2665: mod_base = OTHER; note = thymine
  modified_base 2675: mod_base = OTHER; note = thymine
  modified_base 2687: mod_base = OTHER; note = thymine
  modified_base 2695: mod_base = OTHER; note = thymine
  modified_base 2719..2720: mod_base = OTHER; note = thymine
  modified_base 2740..2741: mod_base = OTHER; note = thymine
  modified_base 2743: mod_base = OTHER; note = thymine
  modified_base 2762: mod_base = OTHER; note = thymine
  modified_base 2765: mod_base = OTHER; note = thymine
  modified_base 2774: mod_base = OTHER; note = thymine
  modified_base 2780: mod_base = OTHER; note = thymine
  modified_base 2797: mod_base = OTHER; note = thymine
  modified_base 2804: mod_base = OTHER; note = thymine
  modified_base 2807: mod_base = OTHER; note = thymine
  modified_base 2810: mod_base = OTHER; note = thymine
  modified_base 2827: mod_base = OTHER; note = thymine
  modified_base 2834: mod_base = OTHER; note = thymine
  modified_base 2852: mod_base = OTHER; note = thymine
  modified_base 2855: mod_base = OTHER; note = thymine
  modified_base 2861: mod_base = OTHER; note = thymine
  modified_base 2867: mod_base = OTHER; note = thymine
  modified_base 2869..2870: mod_base = OTHER; note = thymine
  modified_base 2872: mod_base = OTHER; note = thymine
  modified_base 2879: mod_base = OTHER; note = thymine
  modified_base 2902: mod_base = OTHER; note = thymine
  modified_base 2905..2906: mod_base = OTHER; note = thymine
  modified_base 2909: mod_base = OTHER; note = thymine
  modified_base 2912: mod_base = OTHER; note = thymine
  modified_base 2918: mod_base = OTHER; note = thymine
  modified_base 2920: mod_base = OTHER; note = thymine
  modified_base 2926: mod_base = OTHER; note = thymine
  modified_base 2933: mod_base = OTHER; note = thymine
  modified_base 2945: mod_base = OTHER; note = thymine
  modified_base 2948: mod_base = OTHER; note = thymine
  modified_base 2957: mod_base = OTHER; note = thymine
  modified_base 2962: mod_base = OTHER; note = thymine
  modified_base 2971: mod_base = OTHER; note = thymine
  modified_base 2978: mod_base = OTHER; note = thymine
  modified_base 2986: mod_base = OTHER; note = thymine
  modified_base 2989: mod_base = OTHER; note = thymine
  modified_base 2995..2996: mod_base = OTHER; note = thymine
  modified_base 2998: mod_base = OTHER; note = thymine
  modified_base 3001..3002: mod_base = OTHER; note = thymine
  modified_base 3004: mod_base = OTHER; note = thymine
  modified_base 3008: mod_base = OTHER; note = thymine
  modified_base 3016: mod_base = OTHER; note = thymine
  modified_base 3023: mod_base = OTHER; note = thymine
  modified_base 3026: mod_base = OTHER; note = thymine
  modified_base 3031..3032: mod_base = OTHER; note = thymine
  modified_base 3049: mod_base = OTHER; note = thymine
  modified_base 3056: mod_base = OTHER; note = thymine
  modified_base 3061..3062: mod_base = OTHER; note = thymine
  modified_base 3067: mod_base = OTHER; note = thymine
  modified_base 3070: mod_base = OTHER; note = thymine
  modified_base 3074: mod_base = OTHER; note = thymine
  modified_base 3079: mod_base = OTHER; note = thymine
  modified_base 3085: mod_base = OTHER; note = thymine
  modified_base 3088: mod_base = OTHER; note = thymine
  modified_base 3100..3101: mod_base = OTHER; note = thymine
  modified_base 3103: mod_base = OTHER; note = thymine
  modified_base 3107: mod_base = OTHER; note = thymine
  modified_base 3112: mod_base = OTHER; note = thymine
  modified_base 3127: mod_base = OTHER; note = thymine
  modified_base 3142..3143: mod_base = OTHER; note = thymine
  modified_base 3149: mod_base = OTHER; note = thymine
  modified_base 3151: mod_base = OTHER; note = thymine
  modified_base 3164: mod_base = OTHER; note = thymine
  modified_base 3167: mod_base = OTHER; note = thymine
  modified_base 3170: mod_base = OTHER; note = thymine
  modified_base 3173: mod_base = OTHER; note = thymine
  modified_base 3181: mod_base = OTHER; note = thymine
  modified_base 3188: mod_base = OTHER; note = thymine
  modified_base 3197: mod_base = OTHER; note = thymine
  modified_base 3209: mod_base = OTHER; note = thymine
  modified_base 3217: mod_base = OTHER; note = thymine
  modified_base 3224: mod_base = OTHER; note = thymine
  modified_base 3242: mod_base = OTHER; note = thymine
  misc_feature 1..3249: note = Synthetic
  source 1..3249: mol_type = other RNA
atggccgccttcaagcccaaccccatcaactacatcctgggcctggacatcggcatcgcctccgtgggctgggccatggtggagatcgacgaggaggagaaccccatccggctgatcgacctgggcgtgcgggtgttcgagcgggccgaggtgcccaagaccggcgactccctggccatggcccggcggctggcccggtccgtgcggcggctgacccggcggcgggcccaccggctgctgcgggcccggcggctgctgaagcgggagggcgtgctgcaggccgccgacttcgacgagaacggcctgatcaagtccctgcccaacaccccctggcagctgcgggccgccgccctggaccggaagctgacccccctggagtggtccgccgtgctgctgcacctgatcaagcaccggggctacctgtcccagcggaagaacgagggcgagaccgccgacaaggagctgggcgccctgctgaagggcgtggccaacaacgcccacgccctgcagaccggcgacttccggacccccgccgagctggccctgaacaagttcgagaaggagtccggccacatccggaaccagcggggcgactactcccacaccttctcccggaaggacctgcaggccgagctgatcctgctgttcgagaagcagaaggagttcggcaacccccacgtgtccggcggcctgaaggagggcatcgagaccctgctgatgacccagcggcccgccctgtccggcgacgccgtgcagaagatgctgggccactgcaccttcgagcccgccgagcccaaggccgccaagaacacctacaccgccgagcggttcatctggctgaccaagctgaacaacctgcggatcctggagcagggctccgagcggcccctgaccgacaccgagcgggccaccctgatggacgagccctaccggaagtccaagctgacctacgcccaggcccggaagctgctgggcctggaggacaccgccttcttcaagggcctgcggtacggcaaggacaacgccgaggcctccaccctgatggagatgaaggcctaccacgccatctcccgggccctggagaaggagggcctgaaggacaagaagtcccccctgaacctgtcctccgagctgcaggacgagatcggcaccgccttctccctgttcaagaccgacgaggacatcaccggccggctgaaggaccgggtgcagcccgagatcctggaggccctgctgaagcacatctccttcgacaagttcgtgcagatctccctgaaggccctgcggcggatcgtgcccctgatggagcagggcaagcggtacgacgaggcctgcgccgagatctacggcgaccactacggcaagaagaacaccgaggagaagatctacctgccccccatccccgccgacgagatccggaaccccgtggtgctgcgggccctgtcccaggcccggaaggtgatcaacggcgtggtgcggcggtacggctcccccgcccggatccacatcgagaccgcccgggaggtgggcaagtccttcaaggaccggaaggagatcgagaagcggcaggaggagaaccggaaggaccgggagaaggccgccgccaagttccgggagtacttccccaacttcgtgggcgagcccaagtccaaggacatcctgaagctgcggctgtacgagcagcagcacggcaagtgcctgtactccggcaaggagatcaacctggtgcggctgaacgagaagggctacgtggagatcgacgccgccctgcccttctcccggacctgggacgactccttcaacaacaaggtgctggtgctgggctccgagaaccagaacaagggcaaccagaccccctacgagtacttcaacggcaaggacaactcccgggagtggcaggagttcaaggcccgggtggagacctcccggttcccccggtccaagaagcagcggatcctgctgcagaagttcgacgaggacggcttcaaggagtgcaacctgaacgacacccggtacgtgaaccggttcctgtgccagttcgtggccgaccacatcctgctgaccggcaagggcaagcggcgggtgttcgcctccaacggccagatcaccaacctgctgcggggcttctggggcctgcggaaggtgcgggccgagaacgaccggcaccacgccctggacgccgtggtggtggcctgctccaccgtggccatgcagcagaagatcacccggttcgtgcggtacaaggagatgaacgccttcgacggcaagaccatcgacaaggagaccggcaaggtgctgcaccagaagacccacttcccccagccctgggagttcttcgcccaggaggtgatgatccgggtgttcggcaagcccgacggcaagcccgagttcgaggaggccgacacccccgagaagctgcggaccctgctggccgagaagctgtcctcccggcccgaggccgtgcacgagtacgtgacccccctgttcgtgtcccgggcccccaaccggaagatgtccggcgcccacaaggacaccctgcggtccgccaagcggttcgtgaagcacaacgagaagatctccgtgaagcgggtgtggctgaccgagatcaagctggccgacctggagaacatggtgaactacaagaacggccgggagatcgagctgtacgaggccctgaaggcccggctggaggcctacggcggcaacgccaagcaggccttcgaccccaaggacaaccccttctacaagaagggcggccagctggtgaaggccgtgcgggtggagaagacccaggagtccggcgtgctgctgaacaagaagaacgcctacaccatcgccgacaacggcgacatggtgcgggtggacgtgttctgcaaggtggacaagaagggcaagaaccagtacttcatcgtgcccatctacgcctggcaggtggccgagaacatcctgcccgacatcgactgcaagggctaccggatcgacgactcctacaccttctgcttctccctgcacaagtacgacctgatcgccttccagaaggacgagaagtccaaggtggagttcgcctactacatcaactgcgactcctccaacggccggttctacctggcctggcacgacaagggctccaaggagcagcagttccggatctccacccagaacctggtgctgatccagaagtaccaggtgaacgagctgggcaaggagatccggccctgccggctgaagaagcggccccccgtgcggtga

SEQ ID NO: 275 - RNA, 3249 nt, synthetic construct
  misc_feature 1..3249: note = Synthetic
  source 1..3249: mol_type = other RNA
  modified_base 2: mod_base = OTHER; note = thymine
  modified_base 10..11: mod_base = OTHER; note = thymine
  modified_base 26: mod_base = OTHER; note = thymine
  modified_base 31: mod_base = OTHER; note = thymine
  modified_base 35: mod_base = OTHER; note = thymine
  modified_base 38: mod_base = OTHER; note = thymine
  modified_base 44: mod_base = OTHER; note = thymine
  modified_base 50: mod_base = OTHER; note = thymine
  modified_base 56: mod_base = OTHER; note = thymine
  modified_base 61: mod_base = OTHER; note = thymine
  modified_base 65: mod_base = OTHER; note = thymine
  modified_base 70: mod_base = OTHER; note = thymine
  modified_base 77: mod_base = OTHER; note = thymine
  modified_base 80: mod_base = OTHER; note = thymine
  modified_base 86: mod_base = OTHER; note = thymine
  modified_base 107: mod_base = OTHER; note = thymine
  modified_base 113: mod_base = OTHER; note = thymine
  modified_base 116: mod_base = OTHER; note = thymine
  modified_base 122: mod_base = OTHER; note = thymine
  modified_base 128: mod_base = OTHER; note = thymine
  modified_base 134: mod_base = OTHER; note = thymine
  modified_base 136..137: mod_base = OTHER; note = thymine
  modified_base 152: mod_base = OTHER; note = thymine
  modified_base 169: mod_base = OTHER; note = thymine
  modified_base 173: mod_base = OTHER; note = thymine
  modified_base 179: mod_base = OTHER; note = thymine
  modified_base 191: mod_base = OTHER; note = thymine
  modified_base 199: mod_base = OTHER; note = thymine
  modified_base 203: mod_base = OTHER; note = thymine
  modified_base 212: mod_base = OTHER; note = thymine
  modified_base 236: mod_base = OTHER; note = thymine
  modified_base 239: mod_base = OTHER; note = thymine
  modified_base 254: mod_base = OTHER; note = thymine
  modified_base 257: mod_base = OTHER; note = thymine
  modified_base 272: mod_base = OTHER; note = thymine
  modified_base 275: mod_base = OTHER; note = thymine
  modified_base 289..290: mod_base = OTHER; note = thymine
  modified_base 305: mod_base = OTHER; note = thymine
  modified_base 308: mod_base = OTHER; note = thymine
  modified_base 313: mod_base = OTHER; note = thymine
  modified_base 317: mod_base = OTHER; note = thymine
  modified_base 331: mod_base = OTHER; note = thymine
  modified_base 338: mod_base = OTHER; note = thymine
  modified_base 353: mod_base = OTHER; note = thymine
  modified_base 365: mod_base = OTHER; note = thymine
  modified_base 374: mod_base = OTHER; note = thymine
  modified_base 379: mod_base = OTHER; note = thymine
  modified_base 382: mod_base = OTHER; note = thymine
  modified_base 389: mod_base = OTHER; note = thymine
  modified_base 392: mod_base = OTHER; note = thymine
  modified_base 395: mod_base = OTHER; note = thymine
  modified_base 401: mod_base = OTHER; note = thymine
  modified_base 404: mod_base = OTHER; note = thymine
  modified_base 418: mod_base = OTHER; note = thymine
  modified_base 422: mod_base = OTHER; note = thymine
  modified_base 424: mod_base = OTHER; note = thymine
  modified_base 464: mod_base = OTHER; note = thymine
  modified_base 473: mod_base = OTHER; note = thymine
  modified_base 476: mod_base = OTHER; note = thymine
  modified_base 485: mod_base = OTHER; note = thymine
  modified_base 506: mod_base = OTHER; note = thymine
  modified_base 520..521: mod_base = OTHER; note = thymine
  modified_base 539: mod_base = OTHER; note = thymine
  modified_base 545: mod_base = OTHER; note = thymine
  modified_base 553..554: mod_base = OTHER; note = thymine
  modified_base 565: mod_base = OTHER; note = thymine
  modified_base 575: mod_base = OTHER; note = thymine
  modified_base 595: mod_base = OTHER; note = thymine
  modified_base 598: mod_base = OTHER; note = thymine
  modified_base 607..608: mod_base = OTHER; note = thymine
  modified_base 610: mod_base = OTHER; note = thymine
  modified_base 623: mod_base = OTHER; note = thymine
  modified_base 635: mod_base = OTHER; note = thymine
  modified_base 638: mod_base = OTHER; note = thymine
  modified_base 641: mod_base = OTHER; note = thymine
  modified_base 644: mod_base = OTHER; note = thymine
  modified_base 646..647: mod_base = OTHER; note = thymine
  modified_base 664..665: mod_base = OTHER; note = thymine
  modified_base 680: mod_base = OTHER; note = thymine
  modified_base 682: mod_base = OTHER; note = thymine
  modified_base 692: mod_base = OTHER; note = thymine
  modified_base 704: mod_base = OTHER; note = thymine
  modified_base 713: mod_base = OTHER; note = thymine
  modified_base 716: mod_base = OTHER; note = thymine
  modified_base 719: mod_base = OTHER; note = thymine
  modified_base 737: mod_base = OTHER; note = thymine
  modified_base 739: mod_base = OTHER; note = thymine
  modified_base 752: mod_base = OTHER; note = thymine
  modified_base 761: mod_base = OTHER; note = thymine
  modified_base 764: mod_base = OTHER; note = thymine
  modified_base 772: mod_base = OTHER; note = thymine
  modified_base 778..779: mod_base = OTHER; note = thymine
  modified_base 814: mod_base = OTHER; note = thymine
  modified_base 829..830: mod_base = OTHER; note = thymine
  modified_base 833: mod_base = OTHER; note = thymine
  modified_base 835: mod_base = OTHER; note = thymine
  modified_base 839: mod_base = OTHER; note = thymine
  modified_base 848: mod_base = OTHER; note = thymine
  modified_base 857: mod_base = OTHER; note = thymine
  modified_base 863: mod_base = OTHER; note = thymine
  modified_base 866: mod_base = OTHER; note = thymine
  modified_base 877: mod_base = OTHER; note = thymine
  modified_base 890: mod_base = OTHER; note = thymine
  modified_base 914: mod_base = OTHER; note = thymine
  modified_base 917: mod_base = OTHER; note = thymine
  modified_base 928: mod_base = OTHER; note = thymine
  modified_base 937: mod_base = OTHER; note = thymine
  modified_base 944: mod_base = OTHER; note = thymine
  modified_base 949: mod_base = OTHER; note = thymine
  modified_base 968: mod_base = OTHER; note = thymine
  modified_base 971: mod_base = OTHER; note = thymine
  modified_base 977: mod_base = OTHER; note = thymine
  modified_base 991..992: mod_base = OTHER; note = thymine
  modified_base 994..995: mod_base = OTHER; note = thymine
  modified_base 1004: mod_base = OTHER; note = thymine
  modified_base 1009: mod_base = OTHER; note = thymine
  modified_base 1033: mod_base = OTHER; note = thymine
  modified_base 1040: mod_base = OTHER; note = thymine
  modified_base 1043: mod_base = OTHER; note = thymine
  modified_base 1049: mod_base = OTHER; note = thymine
  modified_base 1057: mod_base = OTHER; note = thymine
  modified_base 1067: mod_base = OTHER; note = thymine
  modified_base 1069: mod_base = OTHER; note = thymine
  modified_base 1079: mod_base = OTHER; note = thymine
  modified_base 1094: mod_base = OTHER; note = thymine
  modified_base 1108: mod_base = OTHER; note = thymine
  modified_base 1115: mod_base = OTHER; note = thymine
  modified_base 1121: mod_base = OTHER; note = thymine
  modified_base 1123: mod_base = OTHER; note = thymine
  modified_base 1126: mod_base = OTHER; note = thymine
  modified_base 1133: mod_base = OTHER; note = thymine
  modified_base 1145: mod_base = OTHER; note = thymine
  modified_base 1156..1157: mod_base = OTHER; note = thymine
  modified_base 1159: mod_base = OTHER; note = thymine
  modified_base 1163: mod_base = OTHER; note = thymine
  modified_base 1165..1166: mod_base = OTHER; note = thymine
  modified_base 1184: mod_base = OTHER; note = thymine
  modified_base 1196: mod_base = OTHER; note = thymine
  modified_base 1208: mod_base = OTHER; note = thymine
  modified_base 1220: mod_base = OTHER; note = thymine
  modified_base 1223: mod_base = OTHER; note = thymine
  modified_base 1232: mod_base = OTHER; note = thymine
  modified_base 1235: mod_base = OTHER; note = thymine
  modified_base 1244: mod_base = OTHER; note = thymine
  modified_base 1246: mod_base = OTHER; note = thymine
  modified_base 1249..1250: mod_base = OTHER; note = thymine
  modified_base 1258..1259: mod_base = OTHER; note = thymine
  modified_base 1262: mod_base = OTHER; note = thymine
  modified_base 1268: mod_base = OTHER; note = thymine
  modified_base 1270: mod_base = OTHER; note = thymine
  modified_base 1274: mod_base = OTHER; note = thymine
  modified_base 1283: mod_base = OTHER; note = thymine
  modified_base 1292: mod_base = OTHER; note = thymine
  modified_base 1295: mod_base = OTHER; note = thymine
  modified_base 1301: mod_base = OTHER; note = thymine
  modified_base 1304: mod_base = OTHER; note = thymine
  modified_base 1321: mod_base = OTHER; note = thymine
  modified_base 1333: mod_base = OTHER; note = thymine
  modified_base 1343: mod_base = OTHER; note = thymine
  modified_base 1345: mod_base = OTHER; note = thymine
  modified_base 1357: mod_base = OTHER; note = thymine
  modified_base 1385: mod_base = OTHER; note = thymine
  modified_base 1387: mod_base = OTHER; note = thymine
  modified_base 1391: mod_base = OTHER; note = thymine
  modified_base 1400: mod_base = OTHER; note = thymine
  modified_base 1415: mod_base = OTHER; note = thymine
  modified_base 1427: mod_base = OTHER; note = thymine
  modified_base 1430: mod_base = OTHER; note = thymine
  modified_base 1433: mod_base = OTHER; note = thymine
  modified_base 1442: mod_base = OTHER; note = thymine
  modified_base 1444: mod_base = OTHER; note = thymine
  modified_base 1460: mod_base = OTHER; note = thymine
  modified_base 1463: mod_base = OTHER; note = thymine
  modified_base 1472: mod_base = OTHER; note = thymine
  modified_base 1475: mod_base = OTHER; note = thymine
  modified_base 1483: mod_base = OTHER; note = thymine
  modified_base 1489: mod_base = OTHER; note = thymine
  modified_base 1502: mod_base = OTHER; note = thymine
  modified_base 1508: mod_base = OTHER; note = thymine
  modified_base 1526: mod_base = OTHER; note = thymine
  modified_base 1534: mod_base = OTHER; note = thymine
  modified_base 1537..1538: mod_base = OTHER; note = thymine
  modified_base 1556: mod_base = OTHER; note = thymine
  modified_base 1609..1610: mod_base = OTHER; note = thymine
  modified_base 1618: mod_base = OTHER; note = thymine
  modified_base 1621..1622: mod_base = OTHER; note = thymine
  modified_base 1630..1631: mod_base = OTHER; note = thymine
  modified_base 1634: mod_base = OTHER; note = thymine
  modified_base 1648: mod_base = OTHER; note = thymine
  modified_base 1658: mod_base = OTHER; note = thymine
  modified_base 1661: mod_base = OTHER; note = thymine
  modified_base 1667: mod_base = OTHER; note = thymine
  modified_base 1673: mod_base = OTHER; note = thymine
  modified_base 1675: mod_base = OTHER; note = thymine
  modified_base 1696: mod_base = OTHER; note = thymine
  modified_base 1700: mod_base = OTHER; note = thymine
  modified_base 1702: mod_base = OTHER; note = thymine
  modified_base 1705: mod_base = OTHER; note = thymine
  modified_base 1718: mod_base = OTHER; note = thymine
  modified_base 1724: mod_base = OTHER; note = thymine
  modified_base 1727: mod_base = OTHER; note = thymine
  modified_base 1733: mod_base = OTHER; note = thymine
  modified_base 1747: mod_base = OTHER; note = thymine
  modified_base 1751: mod_base = OTHER; note = thymine
  modified_base 1757: mod_base = OTHER; note = thymine
  modified_base 1769: mod_base = OTHER; note = thymine
  modified_base 1774..1775: mod_base = OTHER; note = thymine
  modified_base 1777: mod_base = OTHER; note = thymine
  modified_base 1786: mod_base = OTHER; note = thymine
  modified_base 1795: mod_base = OTHER; note = thymine
  modified_base 1798..1799: mod_base = OTHER; note = thymine
  modified_base 1811: mod_base = OTHER; note = thymine
  modified_base 1814: mod_base = OTHER; note = thymine
  modified_base 1817: mod_base = OTHER; note = thymine
  modified_base 1820: mod_base = OTHER; note = thymine
  modified_base 1825: mod_base = OTHER; note = thymine
  modified_base 1858: mod_base = OTHER; note = thymine
  modified_base 1864: mod_base = OTHER; note = thymine
  modified_base 1867..1868: mod_base = OTHER; note = thymine
  modified_base 1885: mod_base = OTHER; note = thymine
  modified_base 1894: mod_base = OTHER; note = thymine
  modified_base 1903..1904: mod_base = OTHER; note = thymine
  modified_base 1916: mod_base = OTHER; note = thymine
  modified_base 1924: mod_base = OTHER; note = thymine
  modified_base 1930..1931: mod_base = OTHER; note = thymine
  modified_base 1939: mod_base = OTHER; note = thymine
  modified_base 1955: mod_base = OTHER; note = thymine
  modified_base 1958: mod_base = OTHER; note = thymine
  modified_base 1961: mod_base = OTHER; note = thymine
  modified_base 1969..1970: mod_base = OTHER; note = thymine
  modified_base 1984..1985: mod_base = OTHER; note = thymine
  modified_base 1993: mod_base = OTHER; note = thymine
  modified_base 2000: mod_base = OTHER; note = thymine
  modified_base 2014: mod_base = OTHER; note = thymine
  modified_base 2018: mod_base = OTHER; note = thymine
  modified_base 2026..2027: mod_base = OTHER; note = thymine
  modified_base 2030: mod_base = OTHER; note = thymine
  modified_base 2032: mod_base = OTHER; note = thymine
  modified_base 2038..2039: mod_base = OTHER; note = thymine
  modified_base 2042: mod_base = OTHER; note = thymine
  modified_base 2054: mod_base = OTHER; note = thymine
  modified_base 2057: mod_base = OTHER; note = thymine
  modified_base 2060: mod_base = OTHER; note = thymine
  modified_base 2084: mod_base = OTHER; note = thymine
  modified_base 2086..2087: mod_base = OTHER; note = thymine
  modified_base 2092: mod_base = OTHER; note = thymine
  modified_base 2105: mod_base = OTHER; note = thymine
  modified_base 2114: mod_base = OTHER; note = thymine
  modified_base 2117: mod_base = OTHER; note = thymine
  modified_base 2125..2126: mod_base = OTHER; note = thymine
  modified_base 2128: mod_base = OTHER; note = thymine
  modified_base 2135: mod_base = OTHER; note = thymine
  modified_base 2144: mod_base = OTHER; note = thymine
  modified_base 2174: mod_base = OTHER; note = thymine
  modified_base 2183: mod_base = OTHER; note = thymine
  modified_base 2186: mod_base = OTHER; note = thymine
  modified_base 2189: mod_base = OTHER; note = thymine
  modified_base 2194: mod_base = OTHER; note = thymine
  modified_base 2197: mod_base = OTHER; note = thymine
  modified_base 2204: mod_base = OTHER; note = thymine
  modified_base 2210: mod_base = OTHER; note = thymine
  modified_base 2222: mod_base = OTHER; note = thymine
  modified_base 2230..2231: mod_base = OTHER; note = thymine
  modified_base 2234: mod_base = OTHER; note = thymine
  modified_base 2239: mod_base = OTHER; note = thymine
  modified_base 2249: mod_base = OTHER; note = thymine
  modified_base 2257..2258: mod_base = OTHER; note = thymine
  modified_base 2273: mod_base = OTHER; note = thymine
  modified_base 2294: mod_base = OTHER; note = thymine
  modified_base 2297: mod_base = OTHER; note = thymine
  modified_base 2314..2315: mod_base = OTHER; note = thymine
  modified_base 2326: mod_base = OTHER; note = thymine
  modified_base 2332..2333: mod_base = OTHER; note = thymine
  modified_base 2335..2336: mod_base = OTHER; note = thymine
  modified_base 2348: mod_base = OTHER; note = thymine
  modified_base 2351: mod_base = OTHER; note = thymine
  modified_base 2354: mod_base = OTHER; note = thymine
  modified_base 2360: mod_base = OTHER; note = thymine
  modified_base 2362..2363: mod_base = OTHER; note = thymine
  modified_base 2389..2390: mod_base = OTHER; note = thymine
  modified_base 2417: mod_base = OTHER; note = thymine
  modified_base 2426: mod_base = OTHER; note = thymine
  modified_base 2429: mod_base = OTHER; note = thymine
  modified_base 2441: mod_base = OTHER; note = thymine
  modified_base 2443: mod_base = OTHER; note = thymine
  modified_base 2446: mod_base = OTHER; note = thymine
  modified_base 2462: mod_base = OTHER; note = thymine
  modified_base 2470: mod_base = OTHER; note = thymine
  modified_base 2474: mod_base = OTHER; note = thymine
  modified_base 2483: mod_base = OTHER; note = thymine
  modified_base 2485..2486: mod_base = OTHER; note = thymine
  modified_base 2489: mod_base = OTHER; note = thymine
  modified_base 2491: mod_base = OTHER; note = thymine
  modified_base 2513: mod_base = OTHER; note = thymine
  modified_base 2515: mod_base = OTHER; note = thymine
  modified_base 2537: mod_base = OTHER; note = thymine
  modified_base 2542: mod_base = OTHER; note = thymine
  modified_base 2554..2555: mod_base = OTHER; note = thymine
  modified_base 2558: mod_base = OTHER; note = thymine
  modified_base 2576: mod_base = OTHER; note = thymine
  modified_base 2578: mod_base = OTHER; note = thymine
  modified_base 2582: mod_base = OTHER; note = thymine
  modified_base 2591: mod_base = OTHER; note = thymine
  modified_base 2593: mod_base = OTHER; note = thymine
  modified_base 2597: mod_base = OTHER; note = thymine
  modified_base 2606: mod_base = OTHER; note = thymine
  modified_base 2612: mod_base = OTHER; note = thymine
  modified_base 2621: mod_base = OTHER; note = thymine
  modified_base 2630: mod_base = OTHER; note = thymine
  modified_base 2633: mod_base = OTHER; note = thymine
  modified_base 2638: mod_base = OTHER; note = thymine
  modified_base 2657: mod_base = OTHER; note = thymine
  modified_base 2663: mod_base = OTHER; note = thymine
  modified_base 2665: mod_base = OTHER; note = thymine
  modified_base 2675: mod_base = OTHER; note = thymine
  modified_base 2687: mod_base = OTHER; note = thymine
  modified_base 2695: mod_base = OTHER; note = thymine
  modified_base 2719..2720: mod_base = OTHER; note = thymine
  modified_base 2740..2741: mod_base = OTHER; note = thymine
  modified_base 2743: mod_base = OTHER; note = thymine
  modified_base 2762: mod_base = OTHER; note = thymine
  modified_base 2765: mod_base = OTHER; note = thymine
  modified_base 2774: mod_base = OTHER; note = thymine
  modified_base 2780: mod_base = OTHER; note = thymine
  modified_base 2797: mod_base = OTHER; note = thymine
  modified_base 2804: mod_base = OTHER; note = thymine
  modified_base 2807: mod_base = OTHER; note = thymine
  modified_base 2810: mod_base = OTHER; note = thymine
  modified_base 2827: mod_base = OTHER; note = thymine
  modified_base 2834: mod_base = OTHER; note = thymine
  modified_base 2852: mod_base = OTHER; note = thymine
  modified_base 2855: mod_base = OTHER; note = thymine
  modified_base 2861: mod_base = OTHER; note = thymine
  modified_base 2867: mod_base = OTHER; note = thymine
  modified_base 2869..2870: mod_base = OTHER; note = thymine
  modified_base 2872: mod_base = OTHER; note = thymine
  modified_base 2879: mod_base = OTHER; note = thymine
  modified_base 2902: mod_base = OTHER; note = thymine
  modified_base 2905..2906: mod_base = OTHER; note = thymine
  modified_base 2909: mod_base = OTHER; note = thymine
  modified_base 2912: mod_base = OTHER; note = thymine
  modified_base 2918: mod_base = OTHER; note = thymine
  modified_base 2920: mod_base = OTHER; note = thymine
  modified_base 2926: mod_base = OTHER; note = thymine
  modified_base 2933: mod_base = OTHER; note = thymine
  modified_base 2945: mod_base = OTHER; note = thymine
  modified_base 2948: mod_base = OTHER; note = thymine
  modified_base 2957: mod_base = OTHER; note = thymine
  modified_base 2962: mod_base = OTHER; note = thymine
  modified_base 2971: mod_base = OTHER; note = thymine
  modified_base 2978: mod_base = OTHER; note = thymine
  modified_base 2986: mod_base = OTHER; note = thymine
  modified_base 2989: mod_base = OTHER; note = thymine
  modified_base 2995..2996: mod_base = OTHER; note = thymine
  modified_base 2998: mod_base = OTHER; note = thymine
  modified_base 3001..3002: mod_base = OTHER; note = thymine
  modified_base 3004: mod_base = OTHER; note = thymine
  modified_base 3008: mod_base = OTHER; note = thymine
  modified_base 3016: mod_base = OTHER; note = thymine
  modified_base 3023: mod_base = OTHER; note = thymine
  modified_base 3026: mod_base = OTHER; note = thymine
  modified_base 3031..3032: mod_base = OTHER; note = thymine
  modified_base 3049: mod_base = OTHER; note = thymine
  modified_base 3056: mod_base = OTHER; note = thymine
  modified_base 3061..3062: mod_base = OTHER; note = thymine
  modified_base 3067: mod_base = OTHER; note = thymine
  modified_base 3070: mod_base = OTHER; note = thymine
  modified_base 3074: mod_base = OTHER; note = thymine
  modified_base 3079: mod_base = OTHER; note = thymine
  modified_base 3085: mod_base = OTHER; note = thymine
  modified_base 3088: mod_base = OTHER; note = thymine
  modified_base 3100..3101: mod_base = OTHER; note = thymine
  modified_base 3103: mod_base = OTHER; note = thymine
  modified_base 3107: mod_base = OTHER; note = thymine
  modified_base 3112: mod_base = OTHER; note = thymine
  modified_base 3127: mod_base = OTHER; note = thymine
  modified_base 3142..3143: mod_base = OTHER; note = thymine
  modified_base 3149: mod_base = OTHER; note = thymine
  modified_base 3151: mod_base = OTHER; note = thymine
  modified_base 3164: mod_base = OTHER; note = thymine
  modified_base 3167: mod_base = OTHER; note = thymine
  modified_base 3170: mod_base = OTHER; note = thymine
  modified_base 3173: mod_base = OTHER; note = thymine
  modified_base 3181: mod_base = OTHER; note = thymine
  modified_base 3188: mod_base = OTHER; note = thymine
  modified_base 3197: mod_base = OTHER; note = thymine
  modified_base 3209: mod_base = OTHER; note = thymine
  modified_base 3217: mod_base = OTHER; note = thymine
  modified_base 3224: mod_base = OTHER; note = thymine
  modified_base 3242: mod_base = OTHER; note = thymine
atggcagcattcaaaccaaacccaatcaactacatcctaggactagacatcggaatcgcatcagtaggatgagcaatggtagaaatcgacgaagaagaaaacccaatccgactaatcgacctaggagtacgagtattcgaacgagcagaagtaccaaaaacaggagactcactagcaatggcacgacgactagcacgatcagtacgacgactaacacgacgacgagcacaccgactactacgagcacgacgactactaaaacgagaaggagtactacaagcagcagacttcgacgaaaacggactaatcaaatcactaccaaacacaccatgacaactacgagcagcagcactagaccgaaaactaacaccactagaatgatcagcagtactactacacctaatcaaacaccgaggatacctatcacaacgaaaaaacgaaggagaaacagcagacaaagaactaggagcactactaaaaggagtagcaaacaacgcacacgcactacaaacaggagacttccgaacaccagcagaactagcactaaacaaattcgaaaaagaatcaggacacatccgaaaccaacgaggagactactcacacacattctcacgaaaagacctacaagcagaactaatcctactattcgaaaaacaaaaagaattcggaaacccacacgtatcaggaggactaaaagaaggaatcgaaacactactaatgacacaacgaccagcactatcaggagacgcagtacaaaaaatgctaggacactgcacattcgaaccagcagaaccaaaagcagcaaaaaacacatacacagcagaacgattcatctgactaacaaaactaaacaacctacgaatcctagaacaaggatcagaacgaccactaacagacacagaacgagcaacactaatggacgaaccataccgaaaatcaaaactaacatacgcacaagcacgaaaactactaggactagaagacacagcattcttcaaaggactacgatacggaaaagacaacgcagaagcatcaacactaatggaaatgaaagcataccacgcaatctcacgagcactagaaaaagaaggactaaaagacaaaaaatcaccactaaacctatcatcagaactacaagacgaaatcggaacagcattctcactattcaaaacagacgaagacatcacaggacgactaaaagaccgagtacaaccagaaatcctagaagcactactaaaacacatctcattcgacaaattcgtacaaatctcactaaaagcactacgacgaatcgtaccactaatggaacaaggaaaacgatacgacgaagcatgcgcagaaatctacggagaccactacggaaaaaaaaacacagaagaaaaaatctacctaccaccaatcccagcagacgaaatccgaaacccagtagtactacgagcactatcacaagcacgaaaagtaatcaacggagtagtacgacgatacggatcaccagcacgaatccacatcgaaacagcacgagaagtaggaaaatcattcaaagaccgaaaagaaatcgaaaaacgacaagaagaaaaccgaaaagaccgagaaaaagcagcagcaaaattccgagaatacttcccaaacttcgtaggagaaccaaaatcaaaagacatcctaaaactacgactatacgaacaacaacacggaaaatgcctatactcaggaaaagaaatcaacctagtacgactaaacgaaaaaggatacgtagaaatcgacgcagcactaccattctcacgaacatgagacgactcattcaacaacaaagtactagtactaggatcagaaaaccaaaacaaaggaaaccaaacaccatacgaatacttcaacggaaaagacaactcacgagaatgacaagaattcaaagcacgagtagaaacatcacgattcccacgatcaaaaaaacaacgaatcctactacaaaaattcgacgaagacggattcaaagaatgcaacctaaacgacacacgatacgtaaaccgattcctatgccaattcgtagcagaccacatcctactaacaggaaaaggaaaacgacgagtattcgcatcaaacggacaaatcacaaacctactacgaggattctgaggactacgaaaagtacgagcagaaaacgaccgacaccacgcactagacgcagtagtagtagcatgctcaacagtagcaatgcaacaaaaaatcacacgattcgtacgatacaaagaaatgaacgcattcgacggaaaaacaatcgacaaagaaacaggaaaagtactacaccaaaaaacacacttcccacaaccatgagaattcttcgcacaagaagtaatgatccgagtattcggaaaaccagacggaaaaccagaattcgaagaagcagacacaccagaaaaactacgaacactactagcagaaaaactatcatcacgaccagaagcagtacacgaatacgtaacaccactattcgtatcacgagcaccaaaccgaaaaatgtcaggagcacacaaagacacactacgatcagcaaaacgattcgtaaaacacaacgaaaaaatctcagtaaaacgagtatgactaacagaaatcaaactagcagacctagaaaacatggtaaactacaaaaacggacgagaaatcgaactatacgaagcactaaaagcacgactagaagcatacggaggaaacgcaaaacaagcattcgacccaaaagacaacccattctacaaaaaaggaggacaactagtaaaagcagtacgagtagaaaaaacacaagaatcaggagtactactaaacaaaaaaaacgcatacacaatcgcagacaacggagacatggtacgagtagacgtattctgcaaagtagacaaaaaaggaaaaaaccaatacttcatcgtaccaatctacgcatgacaagtagcagaaaacatcctaccagacatcgactgcaaaggataccgaatcgacgactcatacacattctgcttctcactacacaaatacgacctaatcgcattccaaaaagacgaaaaatcaaaagtagaattcgcatactacatcaactgcgactcatcaaacggacgattctacctagcatgacacgacaaaggatcaaaagaacaacaattccgaatctcaacacaaaacctagtactaatccaaaaataccaagtaaacgaactaggaaaagaaatccgaccatgccgactaaaaaaacgaccaccagtacgataa

SEQ ID NO: 276 - protein, 1081 aa, synthetic construct
  REGION 1..1081: note = Synthetic
MAAFKPNPINYILGLDIGIASVGWAMVEIDEEENPIRLIDLGVRVFERAEVPKTGDSLAMARRLARSVRRLTRRRAHRLLRARRLLKREGVLQAADFDENGLIKSLPNTPWQLRAAALDRKLTPLEWSAVLLHLIKHRGYLSQRKNEGETADKELGALLKGVADNAHALQTGDFRTPAELALNKFEKECGHIRNQRGDYSHTFSRKDLQAELNLLFEKQKEFGNPHVSGGLKEGIETLLMTQRPALSGDAVQKMLGHCTFEPAEPKAAKNTYTAERFIWLTKLNNLRILEQGSERPLTDTERATLMDEPYRKSKLTYAQARKLLSLEDTAFFKGLRYGKDNAEASTLMEMKAYHTISRALEKEGLKDKKSPLNLSPELQDEIGTAFSLFKTDEDITGRLKDRIQPEILEALLKHISFDKFVQISLKALRRIVPLMEQGKRYDEACAEIYGDHYGKKNTEEKIYLPPIPADEIRNPVVLRALSQARKVINGVVRRYGSPARIHIETAREVGKSFKDRKEIEKRQEENRKDREKAAAKFREYFPNFVGEPKSKDILKLRLYEQQHGKCLYSGKEINLGRLNEKGYVEIDHALPFSRTWDDSFNNKVLVLGSENQNKGNQTPYEYFNGKDNSREWQEFKARVETSRFPRSKKQRILLQKFDEDGFKERNLNDTRYVNRFLCQFVADRMRLTGKGKKRVFASNGQITNLLRGFWGLRKVRAENDRHHALDAVVVACSTVAMQQKITRFVRYKEMNAFDGKTIDKETGEVLHQKTHFPQPWEFFAQEVMIRVFGKPDGKPEFEEADTPEKLRTLLAEKLSSRPEAVHEYVTPLFVSRAPNRKMSGQGHMETVKSAKRLDEGVSVLRVPLTQLKLKDLEKMVNREREPKLYEALKARLEAHKDDPAKAFAEPFYKYDKAGNRTQQVKAVRVEQVQKTGVWVRNHNGIADNATMVRVDVFEKGDKYYLVPIYSWQVAKGILPDRAVVAYADEEDWTVIDESFRFKFVLYSNDLIKVQLKKDSFLGYFSGLDRATGAISLREHDLEKSKGKDGMHRIGVKTALSFQKYQIDEMGKEIRPCRLKKRPPVR

SEQ ID NO: 277 - DNA, 3240 bp, synthetic construct
  misc_feature 1..3240: note = Synthetic
  source 1..3240: mol_type = other DNA
gctgcttttaagcctaatcctattaattatattcttggtcttgatattggtattgcttctgttggttgggctatggttgagattgatgaggaggagaatcctattcgtcttattgatcttggtgttcgtgtttttgagcgtgctgaggttcctaagactggtgattctcttgctatggctcgtcgtcttgctcgttctgttcgtcgtcttactcgtcgtcgtgctcatcgtcttcttcgtgctcgtcgtcttcttaagcgtgagggtgttcttcaggctgctgattttgatgagaatggtcttattaagtctcttcctaatactccttggcagcttcgtgctgctgctcttgatcgtaagcttactcctcttgagtggtctgctgttcttcttcatcttattaagcatcgtggttatctttctcagcgtaagaatgagggtgagactgctgataaggagcttggtgctcttcttaagggtgttgctgataatgctcatgctcttcagactggtgattttcgtactcctgctgagcttgctcttaataagtttgagaaggagtgtggtcatattcgtaatcagcgtggtgattattctcatactttttctcgtaaggatcttcaggctgagcttaatcttctttttgagaagcagaaggagtttggtaatcctcatgtttctggtggtcttaaggagggtattgagactcttcttatgactcagcgtcctgctctttctggtgatgctgttcagaagatgcttggtcattgtacttttgagcctgctgagcctaaggctgctaagaatacttatactgctgagcgttttatttggcttactaagcttaataatcttcgtattcttgagcagggttctgagcgtcctcttactgatactgagcgtgctactcttatggatgagccttatcgtaagtctaagcttacttatgctcaggctcgtaagcttctttctcttgaggatactgctttttttaagggtcttcgttatggtaaggataatgctgaggcttctactcttatggagatgaaggcttatcatactatttctcgtgctcttgagaaggagggtcttaaggataagaagtctcctcttaatctttctcctgagcttcaggatgagattggtactgctttttctctttttaagactgatgaggatattactggtcgtcttaaggatcgtattcagcctgagattcttgaggctcttcttaagcatatttcttttgataagtttgttcagatttctcttaaggctcttcgtcgtattgttcctcttatggagcagggtaagcgttatgatgaggcttgtgctgagatttatggtgatcattatggtaagaagaatactgaggagaagatttatcttcctcctattcctgctgatgagattcgtaatcctgttgttcttcgtgctctttctcaggctcgtaaggttattaatggtgttgttcgtcgttatggttctcctgctcgtattcatattgagactgctcgtgaggttggtaagtcttttaaggatcgtaaggagattgagaagcgtcaggaggagaatcgtaaggatcgtgagaaggctgctgctaagtttcgtgagtattttcctaattttgttggtgagcctaagtctaaggatattcttaagcttcgtctttatgagcagcagcatggtaagtgtctttattctggtaaggagattaatcttggtcgtcttaatgagaagggttatgttgagattgatcatgctcttcctttttctcgtacttgggatgattcttttaataataaggttcttgttcttggttctgagaatcagaataagggtaatcagactccttatgagtattttaatggtaaggataattctcgtgagtggcaggagtttaaggctcgtgttgagacttctcgttttcctcgttctaagaagcagcgtattcttcttcagaagtttgatgaggatggttttaaggagcgtaatcttaatgatactcgttatgttaatcgttttctttgtcagtttgttgctgatcgtatgcgtcttactggtaagggtaagaagcgtgtttttgcttctaatggtcagattactaatcttcttcgtggtttttggggtcttcgtaaggttcgtgctgagaatgatcgtcatcatgctcttgatgctgttgttgttgcttgttctactgttgctatgcagcagaagattactcgttttgttcgttataaggagatgaatgcttttgatggtaagactattgataaggagactggtgaggttcttcatcagaagactcattttcctcagccttgggagttttttgctcaggaggttatgattcgtgtttttggtaagcctgatggtaagcctgagtttgaggaggctgatactcctgagaagcttcgtactcttcttgctgagaagctttcttctcgtcctgaggctgttcatgagtatgttactcctctttttgtttctcgtgctcctaatcgtaagatgtctggtcagggtcatatggagactgttaagtctgctaagcgtcttgatgagggtgtttctgttcttcgtgttcctcttactcagcttaagcttaaggatcttgagaagatggttaatcgtgagcgtgagcctaagctttatgaggctcttaaggctcgtcttgaggctcataaggatgatcctgctaaggcttttgctgagcctttttataagtatgataaggctggtaatcgtactcagcaggttaaggctgttcgtgttgagcaggttcagaagactggtgtttgggttcgtaatcataatggtattgctgataatgctactatggttcgtgttgatgtttttgagaagggtgataagtattatcttgttcctatttattcttggcaggttgctaagggtattcttcctgatcgtgctgttgttgcttatgctgatgaggaggattggactgttattgatgagtcttttcgttttaagtttgttctttattctaatgatcttattaaggttcagcttaagaaggattcttttcttggttatttttctggtcttgatcgtgctactggtgctatttctcttcgtgagcatgatcttgagaagtctaagggtaaggatggtatgcatcgtattggtgttaagactgctctttcttttcagaagtatcagattgatgagatgggtaaggagattcgtccttgtcgtcttaagaagcgtcctcctgttcgt

SEQ ID NO: 278 - DNA, 3240 bp, synthetic construct
  misc_feature 1..3240: note = Synthetic
  source 1..3240: mol_type = other DNA
gccgccttcaagcccaaccccatcaactacatcctgggcctggacatcggcatcgcctccgtgggctgggccatggtggagatcgacgaggaggagaaccccatccggctgatcgacctgggcgtgcgggtgttcgagcgggccgaggtgcccaagaccggcgactccctggccatggcccggcggctggcccggtccgtgcggcggctgacccggcggcgggcccaccggctgctgcgggcccggcggctgctgaagcgggagggcgtgctgcaggccgccgacttcgacgagaacggcctgatcaagtccctgcccaacaccccctggcagctgcgggccgccgccctggaccggaagctgacccccctggagtggtccgccgtgctgctgcacctgatcaagcaccggggctacctgtcccagcggaagaacgagggcgagaccgccgacaaggagctgggcgccctgctgaagggcgtggccgacaacgcccacgccctgcagaccggcgacttccggacccccgccgagctggccctgaacaagttcgagaaggagtgcggccacatccggaaccagcggggcgactactcccacaccttctcccggaaggacctgcaggccgagctgaacctgctgttcgagaagcagaaggagttcggcaacccccacgtgtccggcggcctgaaggagggcatcgagaccctgctgatgacccagcggcccgccctgtccggcgacgccgtgcagaagatgctgggccactgcaccttcgagcccgccgagcccaaggccgccaagaacacctacaccgccgagcggttcatctggctgaccaagctgaacaacctgcggatcctggagcagggctccgagcggcccctgaccgacaccgagcgggccaccctgatggacgagccctaccggaagtccaagctgacctacgcccaggcccggaagctgctgtccctggaggacaccgccttcttcaagggcctgcggtacggcaaggacaacgccgaggcctccaccctgatggagatgaaggcctaccacaccatctcccgggccctggagaaggagggcctgaaggacaagaagtcccccctgaacctgtcccccgagctgcaggacgagatcggcaccgccttctccctgttcaagaccgacgaggacatcaccggccggctgaaggaccggatccagcccgagatcctggaggccctgctgaagcacatctccttcgacaagttcgtgcagatctccctgaaggccctgcggcggatcgtgcccctgatggagcagggcaagcggtacgacgaggcctgcgccgagatctacggcgaccactacggcaagaagaacaccgaggagaagatctacctgccccccatccccgccgacgagatccggaaccccgtggtgctgcgggccctgtcccaggcccggaaggtgatcaacggcgtggtgcggcggtacggctcccccgcccggatccacatcgagaccgcccgggaggtgggcaagtccttcaaggaccggaaggagatcgagaagcggcaggaggagaaccggaaggaccgggagaaggccgccgccaagttccgggagtacttccccaacttcgtgggcgagcccaagtccaaggacatcctgaagctgcggctgtacgagcagcagcacggcaagtgcctgtactccggcaaggagatcaacctgggccggctgaacgagaagggctacgtggagatcgaccacgccctgcccttctcccggacctgggacgactccttcaacaacaaggtgctggtgctgggctccgagaaccagaacaagggcaaccagaccccctacgagtacttcaacggcaaggacaactcccgggagtggcaggagttcaaggcccgggtggagacctcccggttcccccggtccaagaagcagcggatcctgctgcagaagttcgacgaggacggcttcaaggagcggaacctgaacgacacccggtacgtgaaccggttcctgtgccagttcgtggccgaccggatgcggctgaccggcaagggcaagaagcgggtgttcgcctccaacggccagatcaccaacctgctgcggggcttctggggcctgcggaaggtgcgggccgagaacgaccggcaccacgccctggacgccgtggtggtggcctgctccaccgtggccatgcagcagaagatcacccggttcgtgcggtacaaggagatgaacgccttcgacggcaagaccatcgacaaggagaccggcgaggtgctgcaccagaagacccacttcccccagccctgggagttcttcgcccaggaggtgatgatccgggtgttcggcaagcccgacggcaagcccgagttcgaggaggccgacacccccgagaagctgcggaccctgctggccgagaagctgtcctcccggcccgaggccgtgcacgagtacgtgacccccctgttcgtgtcccgggcccccaaccggaagatgtccggccagggccacatggagaccgtgaagtccgccaagcggctggacgagggcgtgtccgtgctgcgggtgcccctgacccagctgaagctgaaggacctggagaagatggtgaaccgggagcgggagcccaagctgtacgaggccctgaaggcccggctggaggcccacaaggacgaccccgccaaggccttcgccgagcccttctacaagtacgacaaggccggcaaccggacccagcaggtgaaggccgtgcgggtggagcaggtgcagaagaccggcgtgtgggtgcggaaccacaacggcatcgccgacaacgccaccatggtgcgggtggacgtgttcgagaagggcgacaagtactacctggtgcccatctactcctggcaggtggccaagggcatcctgcccgaccgggccgtggtggcctacgccgacgaggaggactggaccgtgatcgacgagtccttccggttcaagttcgtgctgtactccaacgacctgatcaaggtgcagctgaagaaggactccttcctgggctacttctccggcctggaccgggccaccggcgccatctccctgcgggagcacgacctggagaagtccaagggcaaggacggcatgcaccggatcggcgtgaagaccgccctgtccttccagaagtaccagatcgacgagatgggcaaggagatccggccctgccggctgaagaagcggccccccgtgcgg

SEQ ID NO: 279 - DNA, 3240 bp, synthetic construct
  misc_feature 1..3240: note = Synthetic
  source 1..3240: mol_type = other DNA
gcagcattcaaaccaaacccaatcaactacatcctaggactagacatcggaatcgcatcagtaggatgagcaatggtagaaatcgacgaagaagaaaacccaatccgactaatcgacctaggagtacgagtattcgaacgagcagaagtaccaaaaacaggagactcactagcaatggcacgacgactagcacgatcagtacgacgactaacacgacgacgagcacaccgactactacgagcacgacgactactaaaacgagaaggagtactacaagcagcagacttcgacgaaaacggactaatcaaatcactaccaaacacaccatgacaactacgagcagcagcactagaccgaaaactaacaccactagaatgatcagcagtactactacacctaatcaaacaccgaggatacctatcacaacgaaaaaacgaaggagaaacagcagacaaagaactaggagcactactaaaaggagtagcagacaacgcacacgcactacaaacaggagacttccgaacaccagcagaactagcactaaacaaattcgaaaaagaatgcggacacatccgaaaccaacgaggagactactcacacacattctcacgaaaagacctacaagcagaactaaacctactattcgaaaaacaaaaagaattcggaaacccacacgtatcaggaggactaaaagaaggaatcgaaacactactaatgacacaacgaccagcactatcaggagacgcagtacaaaaaatgctaggacactgcacattcgaaccagcagaaccaaaagcagcaaaaaacacatacacagcagaacgattcatctgactaacaaaactaaacaacctacgaatcctagaacaaggatcagaacgaccactaacagacacagaacgagcaacactaatggacgaaccataccgaaaatcaaaactaacatacgcacaagcacgaaaactactatcactagaagacacagcattcttcaaaggactacgatacggaaaagacaacgcagaagcatcaacactaatggaaatgaaagcataccacacaatctcacgagcactagaaaaagaaggactaaaagacaaaaaatcaccactaaacctatcaccagaactacaagacgaaatcggaacagcattctcactattcaaaacagacgaagacatcacaggacgactaaaagaccgaatccaaccagaaatcctagaagcactactaaaacacatctcattcgacaaattcgtacaaatctcactaaaagcactacgacgaatcgtaccactaatggaacaaggaaaacgatacgacgaagcatgcgcagaaatctacggagaccactacggaaaaaaaaacacagaagaaaaaatctacctaccaccaatcccagcagacgaaatccgaaacccagtagtactacgagcactatcacaagcacgaaaagtaatcaacggagtagtacgacgatacggatcaccagcacgaatccacatcgaaacagcacgagaagtaggaaaatcattcaaagaccgaaaagaaatcgaaaaacgacaagaagaaaaccgaaaagaccgagaaaaagcagcagcaaaattccgagaatacttcccaaacttcgtaggagaaccaaaatcaaaagacatcctaaaactacgactatacgaacaacaacacggaaaatgcctatactcaggaaaagaaatcaacctaggacgactaaacgaaaaaggatacgtagaaatcgaccacgcactaccattctcacgaacatgagacgactcattcaacaacaaagtactagtactaggatcagaaaaccaaaacaaaggaaaccaaacaccatacgaatacttcaacggaaaagacaactcacgagaatgacaagaattcaaagcacgagtagaaacatcacgattcccacgatcaaaaaaacaacgaatcctactacaaaaattcgacgaagacggattcaaagaacgaaacctaaacgacacacgatacgtaaaccgattcctatgccaattcgtagcagaccgaatgcgactaacaggaaaaggaaaaaaacgagtattcgcatcaaacggacaaatcacaaacctactacgaggattctgaggactacgaaaagtacgagcagaaaacgaccgacaccacgcactagacgcagtagtagtagcatgctcaacagtagcaatgcaacaaaaaatcacacgattcgtacgatacaaagaaatgaacgcattcgacggaaaaacaatcgacaaagaaacaggagaagtactacaccaaaaaacacacttcccacaaccatgagaattcttcgcacaagaagtaatgatccgagtattcggaaaaccagacggaaaaccagaattcgaagaagcagacacaccagaaaaactacgaacactactagcagaaaaactatcatcacgaccagaagcagtacacgaatacgtaacaccactattcgtatcacgagcaccaaaccgaaaaatgtcaggacaaggacacatggaaacagtaaaatcagcaaaacgactagacgaaggagtatcagtactacgagtaccactaacacaactaaaactaaaagacctagaaaaaatggtaaaccgagaacgagaaccaaaactatacgaagcactaaaagcacgactagaagcacacaaagacgacccagcaaaagcattcgcagaaccattctacaaatacgacaaagcaggaaaccgaacacaacaagtaaaagcagtacgagtagaacaagtacaaaaaacaggagtatgagtacgaaaccacaacggaatcgcagacaacgcaacaatggtacgagtagacgtattcgaaaaaggagacaaatactacctagtaccaatctactcatgacaagtagcaaaaggaatcctaccagaccgagcagtagtagcatacgcagacgaagaagactgaacagtaatcgacgaatcattccgattcaaattcgtactatactcaaacgacctaatcaaagtacaactaaaaaaagactcattcctaggatacttctcaggactagaccgagcaacaggagcaatctcactacgagaacacgacctagaaaaatcaaaaggaaaagacggaatgcaccgaatcggagtaaaaacagcactatcattccaaaaataccaaatcgacgaaatgggaaaagaaatccgaccatgccgactaaaaaaacgaccaccagtacga

SEQ ID NO: 280 - RNA, 3246 nt, synthetic construct
  modified_base 2: mod_base = OTHER; note = thymine
  modified_base 6: mod_base = OTHER; note = thymine
  modified_base 9..12: mod_base = OTHER; note = thymine
  modified_base 18: mod_base = OTHER; note = thymine
  modified_base 21: mod_base = OTHER; note = thymine
  modified_base 24: mod_base = OTHER; note = thymine
  modified_base 26..27: mod_base = OTHER; note = thymine
  modified_base 30..31: mod_base = OTHER; note = thymine
  modified_base 33: mod_base = OTHER; note = thymine
  modified_base 35..36: mod_base = OTHER; note = thymine
  modified_base 38..39: mod_base = OTHER; note = thymine
  modified_base 42: mod_base = OTHER; note = thymine
  modified_base 44..45: mod_base = OTHER; note = thymine
  modified_base 48: mod_base = OTHER; note = thymine
  modified_base 50..51: mod_base = OTHER; note = thymine
  modified_base 54: mod_base = OTHER; note = thymine
  modified_base 56..57: mod_base = OTHER; note = thymine
  modified_base 60..61: mod_base = OTHER; note = thymine
  modified_base 63: mod_base = OTHER; note = thymine
  modified_base 65..66: mod_base = OTHER; note = thymine
  modified_base 69..70: mod_base = OTHER; note = thymine
  modified_base 75: mod_base = OTHER; note = thymine
  modified_base 77: mod_base = OTHER; note = thymine
  modified_base 80..81: mod_base = OTHER; note = thymine
  modified_base 86..87: mod_base = OTHER; note = thymine
  modified_base 90: mod_base = OTHER; note = thymine
  modified_base 102: mod_base = OTHER; note = thymine
  modified_base 105: mod_base = OTHER; note = thymine
  modified_base 107..108: mod_base = OTHER; note = thymine
  modified_base 111: mod_base = OTHER; note = thymine
  modified_base 113..114: mod_base = OTHER; note = thymine
  modified_base 116..117: mod_base = OTHER; note = thymine
  modified_base 120: mod_base = OTHER; note = thymine
  modified_base 122..123: mod_base = OTHER; note = thymine
  modified_base 126: mod_base = OTHER; note = thymine
  modified_base 128..129: mod_base = OTHER; note = thymine
  modified_base 132: mod_base = OTHER; note = thymine
  modified_base 134..138: mod_base = OTHER; note = thymine
  modified_base 144: mod_base = OTHER; note = thymine
  modified_base 147: mod_base = OTHER; note = thymine
  modified_base 152..153: mod_base = OTHER; note = thymine
  modified_base 156: mod_base = OTHER; note = thymine
  modified_base 162: mod_base = OTHER; note = thymine
  modified_base 165: mod_base = OTHER; note = thymine
  modified_base 168..169: mod_base = OTHER; note = thymine
  modified_base 171: mod_base = OTHER; note = thymine
  modified_base 173..174: mod_base = OTHER; note = thymine
  modified_base 177: mod_base = OTHER; note = thymine
  modified_base 179: mod_base = OTHER; note = thymine
  modified_base 183: mod_base = OTHER; note = thymine
  modified_base 186: mod_base = OTHER; note = thymine
  modified_base 189: mod_base = OTHER; note = thymine
  modified_base 191..192: mod_base = OTHER; note = thymine
  modified_base 195: mod_base = OTHER; note = thymine
  modified_base 198..199: mod_base = OTHER; note = thymine
  modified_base 201: mod_base = OTHER; note = thymine
  modified_base 203..204: mod_base = OTHER; note = thymine
  modified_base 207: mod_base = OTHER; note = thymine
  modified_base 210: mod_base = OTHER; note = thymine
  modified_base 212..213: mod_base = OTHER; note = thymine
  modified_base 216: mod_base = OTHER; note = thymine
  modified_base 219: mod_base = OTHER; note = thymine
  modified_base 222: mod_base = OTHER; note = thymine
  modified_base 225: mod_base = OTHER; note = thymine
  modified_base 228: mod_base = OTHER; note = thymine
  modified_base 231: mod_base = OTHER; note = thymine
  modified_base 234: mod_base = OTHER; note = thymine
  modified_base 236..237: mod_base = OTHER; note = thymine
  modified_base 239..240: mod_base = OTHER; note = thymine
  modified_base 243: mod_base = OTHER; note = thymine
  modified_base 246: mod_base = OTHER; note = thymine
  modified_base 249: mod_base = OTHER; note = thymine
  modified_base 252: mod_base = OTHER; note = thymine
  modified_base 254..255: mod_base = OTHER; note = thymine
  modified_base 257..258: mod_base = OTHER; note = thymine
  modified_base 264: mod_base = OTHER; note = thymine
  modified_base 270: mod_base = OTHER; note = thymine
  modified_base 272..273: mod_base = OTHER; note = thymine
  modified_base 275..276: mod_base = OTHER; note = thymine
  modified_base 282: mod_base = OTHER; note = thymine
  modified_base 285: mod_base = OTHER; note = thymine
  modified_base 288..291: mod_base = OTHER; note = thymine
  modified_base 294: mod_base = OTHER; note = thymine
  modified_base 300: mod_base = OTHER; note = thymine
  modified_base 303: mod_base = OTHER; note = thymine
  modified_base 305..306: mod_base = OTHER; note = thymine
  modified_base 308..309: mod_base = OTHER; note = thymine
  modified_base 313: mod_base = OTHER; note = thymine
  modified_base 315: mod_base = OTHER; note = thymine
  modified_base 317..318: mod_base = OTHER; note = thymine
  modified_base 321: mod_base = OTHER; note = thymine
  modified_base 324: mod_base = OTHER; note = thymine
  modified_base 327: mod_base = OTHER; note = thymine
  modified_base 330..331: mod_base = OTHER; note = thymine
  modified_base 338..339: mod_base = OTHER; note = thymine
  modified_base 342: mod_base = OTHER; note = thymine
  modified_base 345: mod_base = OTHER; note = thymine
  modified_base 348: mod_base = OTHER; note = thymine
  modified_base 351: mod_base = OTHER; note = thymine
  modified_base 353..354: mod_base = OTHER; note = thymine
  modified_base 357: mod_base = OTHER; note = thymine
  modified_base 360: mod_base = OTHER; note = thymine
  modified_base 365..366: mod_base = OTHER; note = thymine
  modified_base 369: mod_base = OTHER; note = thymine
  modified_base 372: mod_base = OTHER; note = thymine
  modified_base 374..375: mod_base = OTHER; note = thymine
  modified_base 379: mod_base = OTHER; note = thymine
  modified_base 382: mod_base = OTHER; note = thymine
  modified_base 384: mod_base = OTHER; note = thymine
  modified_base 387: mod_base = OTHER; note = thymine
  modified_base 389..390: mod_base = OTHER; note = thymine
  modified_base 392..393: mod_base = OTHER; note = thymine
  modified_base 395..396: mod_base = OTHER; note = thymine
  modified_base 399: mod_base = OTHER; note = thymine
  modified_base 401..402: mod_base = OTHER; note = thymine
  modified_base 404..405: mod_base = OTHER; note = thymine
  modified_base 411: mod_base = OTHER; note = thymine
  modified_base 414: mod_base = OTHER; note = thymine
  modified_base 417..418: mod_base = OTHER; note = thymine
  modified_base 420: mod_base = OTHER; note = thymine
  modified_base 422..424: mod_base = OTHER; note = thymine
  modified_base 426: mod_base = OTHER; note = thymine
  modified_base 432: mod_base = OTHER; note = thymine
  modified_base 438: mod_base = OTHER; note = thymine
  modified_base 444: mod_base = OTHER; note = thymine
  modified_base 450: mod_base = OTHER; note = thymine
  modified_base 453: mod_base = OTHER; note = thymine
  modified_base 456: mod_base = OTHER; note = thymine
  modified_base 464..465: mod_base = OTHER; note = thymine
  modified_base 468: mod_base = OTHER; note = thymine
  modified_base 471: mod_base = OTHER; note = thymine
  modified_base 473..474: mod_base = OTHER; note = thymine
  modified_base 476..477: mod_base = OTHER; note = thymine
  modified_base 483: mod_base = OTHER; note = thymine
  modified_base 485..486: mod_base = OTHER; note = thymine
  modified_base 489: mod_base = OTHER; note = thymine
  modified_base 492: mod_base = OTHER; note = thymine
  modified_base 495: mod_base = OTHER; note = thymine
  modified_base 498: mod_base = OTHER; note = thymine
  modified_base 501: mod_base = OTHER; note = thymine
  modified_base 504: mod_base = OTHER; note = thymine
  modified_base 506..507: mod_base = OTHER; note = thymine
  modified_base 513: mod_base = OTHER; note = thymine
  modified_base 516: mod_base = OTHER; note = thymine
  modified_base 519..522: mod_base = OTHER; note = thymine
  modified_base 525: mod_base = OTHER; note = thymine
  modified_base 528: mod_base = OTHER; note = thymine
  modified_base 531: mod_base = OTHER; note = thymine
  modified_base 534: mod_base = OTHER; note = thymine
  modified_base 539..540: mod_base = OTHER; note = thymine
  modified_base 543: mod_base = OTHER; note = thymine
  modified_base 545..546: mod_base = OTHER; note = thymine
  modified_base 549: mod_base = OTHER; note = thymine
  modified_base 553..555: mod_base = OTHER; note = thymine
  modified_base 565: mod_base = OTHER; note = thymine
  modified_base 567: mod_base = OTHER; note = thymine
  modified_base 570: mod_base = OTHER; note = thymine
  modified_base 573: mod_base = OTHER; note = thymine
  modified_base 575..576: mod_base = OTHER; note = thymine
  modified_base 579: mod_base = OTHER; note = thymine
  modified_base 582: mod_base = OTHER; note = thymine
  modified_base 588: mod_base = OTHER; note = thymine
  modified_base 591: mod_base = OTHER; note = thymine
  modified_base 594..595: mod_base = OTHER; note = thymine
  modified_base 597..598: mod_base = OTHER; note = thymine
  modified_base 600: mod_base = OTHER; note = thymine
  modified_base 603: mod_base = OTHER; note = thymine
  modified_base 606..610: mod_base = OTHER; note = thymine
  modified_base 612: mod_base = OTHER; note = thymine
  modified_base 615: mod_base = OTHER; note = thymine
  modified_base 621: mod_base = OTHER; note = thymine
  modified_base 623..624: mod_base = OTHER; note = thymine
  modified_base 630: mod_base = OTHER; note = thymine
  modified_base 635..636: mod_base = OTHER; note = thymine
  modified_base 639: mod_base = OTHER; note = thymine
  modified_base 641..642: mod_base = OTHER; note = thymine
  modified_base 644..648: mod_base = OTHER; note = thymine
  modified_base 664..666: mod_base = OTHER; note = thymine
  modified_base 669: mod_base = OTHER; note = thymine
  modified_base 672: mod_base = OTHER; note = thymine
  modified_base 675: mod_base = OTHER; note = thymine
  modified_base 678: mod_base = OTHER; note = thymine
  modified_base 680..682: mod_base = OTHER; note = thymine
  modified_base 684: mod_base = OTHER; note = thymine
  modified_base 687: mod_base = OTHER; note = thymine
  modified_base 690: mod_base = OTHER; note = thymine
  modified_base 692..693: mod_base = OTHER; note = thymine
  modified_base 702: mod_base = OTHER; note = thymine
  modified_base 704..705: mod_base = OTHER; note = thymine
  modified_base 711: mod_base = OTHER; note = thymine
  modified_base 713..714: mod_base = OTHER; note = thymine
  modified_base 716..717: mod_base = OTHER; note = thymine
  modified_base 719: mod_base = OTHER; note = thymine
  modified_base 723: mod_base = OTHER; note = thymine
  modified_base 729: mod_base = OTHER; note = thymine
  modified_base 732: mod_base = OTHER; note = thymine
  modified_base 735: mod_base = OTHER; note = thymine
  modified_base 737..739: mod_base = OTHER; note = thymine
  modified_base 741: mod_base = OTHER; note = thymine
  modified_base 744: mod_base = OTHER; note = thymine
  modified_base 747: mod_base = OTHER; note = thymine
  modified_base 750: mod_base = OTHER; note = thymine
  modified_base 752..753: mod_base = OTHER; note = thymine
  modified_base 761: mod_base = OTHER; note = thymine
  modified_base 764..765: mod_base = OTHER; note = thymine
  modified_base 768: mod_base = OTHER; note = thymine
  modified_base 771..772: mod_base = OTHER; note = thymine
  modified_base 774: mod_base = OTHER; note = thymine
  modified_base 777..780: mod_base = OTHER; note = thymine
  modified_base 786: mod_base = OTHER; note = thymine
  modified_base 789: mod_base = OTHER; note = thymine
  modified_base 795: mod_base = OTHER; note = thymine
  modified_base 801: mod_base = OTHER; note = thymine
  modified_base 804: mod_base = OTHER; note = thymine
  modified_base 810: mod_base = OTHER; note = thymine
  modified_base 813..814: mod_base = OTHER; note = thymine
  modified_base 816: mod_base = OTHER; note = thymine
  modified_base 819: mod_base = OTHER; note = thymine
  modified_base 822: mod_base = OTHER; note = thymine
  modified_base 828..831: mod_base = OTHER; note = thymine
  modified_base 833..835: mod_base = OTHER; note = thymine
  modified_base 839..840: mod_base = OTHER; note = thymine
  modified_base 843: mod_base = OTHER; note = thymine
  modified_base 848..849: mod_base = OTHER; note = thymine
  modified_base 852: mod_base = OTHER; note = thymine
  modified_base 855: mod_base = OTHER; note = thymine
  modified_base 857..858: mod_base = OTHER; note = thymine
  modified_base 861: mod_base = OTHER; note = thymine
  modified_base 863..864: mod_base = OTHER; note = thymine
  modified_base 866..867: mod_base = OTHER; note = thymine
  modified_base 876..877: mod_base = OTHER; note = thymine
  modified_base 879: mod_base = OTHER; note = thymine
  modified_base 885: mod_base = OTHER; note = thymine
  modified_base 888: mod_base = OTHER; note = thymine
  modified_base 890..891: mod_base = OTHER; note = thymine
  modified_base 894: mod_base = OTHER; note = thymine
  modified_base 897: mod_base = OTHER; note = thymine
  modified_base 900: mod_base = OTHER; note = thymine
  modified_base 906: mod_base = OTHER; note = thymine
  modified_base 909: mod_base = OTHER; note = thymine
  modified_base 912: mod_base = OTHER; note = thymine
  modified_base 914..915: mod_base = OTHER; note = thymine
  modified_base 917: mod_base = OTHER; note = thymine
  modified_base 921: mod_base = OTHER; note = thymine
  modified_base 927..928: mod_base = OTHER; note = thymine
  modified_base 930: mod_base = OTHER; note = thymine
  modified_base 933: mod_base = OTHER; note = thymine
  modified_base 937: mod_base = OTHER; note = thymine
  modified_base 939: mod_base = OTHER; note = thymine
  modified_base 944..945: mod_base = OTHER; note = thymine
  modified_base 948..949: mod_base = OTHER; note = thymine
  modified_base 951: mod_base = OTHER; note = thymine
  modified_base 954: mod_base = OTHER; note = thymine
  modified_base 960: mod_base = OTHER; note = thymine
  modified_base 963: mod_base = OTHER; note = thymine
  modified_base 968..969: mod_base = OTHER; note = thymine
  modified_base 971..973: mod_base = OTHER; note = thymine
  modified_base 975: mod_base = OTHER; note = thymine
  modified_base 977..978: mod_base = OTHER; note = thymine
  modified_base 984: mod_base = OTHER; note = thymine
  modified_base 987: mod_base = OTHER; note = thymine
  modified_base 990..996: mod_base = OTHER; note = thymine
  modified_base 1002: mod_base = OTHER; note = thymine
  modified_base 1004..1005: mod_base = OTHER; note = thymine
  modified_base 1008..1009: mod_base = OTHER; note = thymine
  modified_base 1011: mod_base = OTHER; note = thymine
  modified_base 1014: mod_base = OTHER; note = thymine
  modified_base 1020: mod_base = OTHER; note = thymine
  modified_base 1023: mod_base = OTHER; note = thymine
  modified_base 1026: mod_base = OTHER; note = thymine
  modified_base 1032..1033: mod_base = OTHER; note = thymine
  modified_base 1035: mod_base = OTHER; note = thymine
  modified_base 1038: mod_base = OTHER; note = thymine
  modified_base 1040..1041: mod_base = OTHER; note = thymine
  modified_base 1043: mod_base = OTHER; note = thymine
  modified_base 1049: mod_base = OTHER; note = thymine
  modified_base 1056..1057: mod_base = OTHER; note = thymine
  modified_base 1059: mod_base = OTHER; note = thymine
  modified_base 1062: mod_base = OTHER; note = thymine
  modified_base 1065: mod_base = OTHER; note = thymine
  modified_base 1067..1069: mod_base = OTHER; note = thymine
  modified_base 1071: mod_base = OTHER; note = thymine
  modified_base 1074: mod_base = OTHER; note = thymine
  modified_base 1077: mod_base = OTHER; note = thymine
  modified_base 1079..1080: mod_base = OTHER; note = thymine
  modified_base 1092: mod_base = OTHER; note = thymine
  modified_base 1094..1095: mod_base = OTHER; note = thymine
  modified_base 1101: mod_base = OTHER; note = thymine
  modified_base 1108: mod_base = OTHER; note = thymine
  modified_base 1110: mod_base = OTHER; note = thymine
  modified_base 1113: mod_base = OTHER; note = thymine
  modified_base 1115..1116: mod_base = OTHER; note = thymine
  modified_base 1119: mod_base = OTHER; note = thymine
  modified_base 1121..1123: mod_base = OTHER; note = thymine
  modified_base 1125: mod_base = OTHER; note = thymine
  modified_base 1128: mod_base = OTHER; note = thymine
  modified_base 1133..1134: mod_base = OTHER; note = thymine
  modified_base 1140: mod_base = OTHER; note = thymine
  modified_base 1145..1146: mod_base = OTHER; note = thymine
  modified_base 1149: mod_base = OTHER; note = thymine
  modified_base 1152: mod_base = OTHER; note = thymine
  modified_base 1155..1159: mod_base = OTHER; note = thymine
  modified_base 1161: mod_base = OTHER; note = thymine
  modified_base 1163..1167: mod_base = OTHER; note = thymine
  modified_base 1173: mod_base = OTHER; note = thymine
  modified_base 1176: mod_base = OTHER; note = thymine
  modified_base 1182: mod_base = OTHER; note = thymine
  modified_base 1184..1185: mod_base = OTHER; note = thymine
  modified_base 1188: mod_base = OTHER; note = thymine
  modified_base 1191: mod_base = OTHER; note = thymine
  modified_base 1194: mod_base = OTHER; note = thymine
  modified_base 1196..1197: mod_base = OTHER; note = thymine
  modified_base 1203: mod_base = OTHER; note = thymine
  modified_base 1206: mod_base = OTHER; note = thymine
  modified_base 1208..1209: mod_base = OTHER; note = thymine
  modified_base 1215: mod_base = OTHER; note = thymine
  modified_base 1220..1221: mod_base = OTHER; note = thymine
  modified_base 1223..1224: mod_base = OTHER; note = thymine
  modified_base 1230: mod_base = OTHER; note = thymine
  modified_base 1232..1233: mod_base = OTHER; note = thymine
  modified_base 1235..1236: mod_base = OTHER; note = thymine
  modified_base 1242: mod_base = OTHER; note = thymine
  modified_base 1244..1246: mod_base = OTHER; note = thymine
  modified_base 1248..1251: mod_base = OTHER; note = thymine
  modified_base 1254: mod_base = OTHER; note = thymine
  modified_base 1258..1260: mod_base = OTHER; note = thymine
  modified_base 1262..1263: mod_base = OTHER; note = thymine
  modified_base 1268..1270: mod_base = OTHER; note = thymine
  modified_base 1272: mod_base = OTHER; note = thymine
  modified_base 1274..1275: mod_base = OTHER; note = thymine
  modified_base 1281: mod_base = OTHER; note = thymine
  modified_base 1283..1284: mod_base = OTHER; note = thymine
  modified_base 1287: mod_base = OTHER; note = thymine
  modified_base 1290: mod_base = OTHER; note = thymine
  modified_base 1292..1293: mod_base = OTHER; note = thymine
  modified_base 1295..1296: mod_base = OTHER; note = thymine
  modified_base 1299: mod_base = OTHER; note = thymine
  modified_base 1301..1302: mod_base = OTHER; note = thymine
  modified_base 1304: mod_base = OTHER; note = thymine
  modified_base 1314: mod_base = OTHER; note = thymine
  modified_base 1320..1321: mod_base = OTHER; note = thymine
  modified_base 1323: mod_base = OTHER; note = thymine
  modified_base 1326: mod_base = OTHER; note = thymine
  modified_base 1332..1333: mod_base = OTHER; note = thymine
  modified_base 1335: mod_base = OTHER; note = thymine
  modified_base 1338: mod_base = OTHER; note = thymine
  modified_base 1343..1345: mod_base = OTHER; note = thymine
  modified_base 1347: mod_base = OTHER; note = thymine
  modified_base 1350: mod_base = OTHER; note = thymine
  modified_base 1353: mod_base = OTHER; note = thymine
  modified_base 1356..1357: mod_base = OTHER; note = thymine
  modified_base 1359: mod_base = OTHER; note = thymine
  modified_base 1362: mod_base = OTHER; note = thymine
  modified_base 1371: mod_base = OTHER; note = thymine
  modified_base 1374: mod_base = OTHER; note = thymine
  modified_base 1385..1387: mod_base = OTHER; note = thymine
  modified_base 1389: mod_base = OTHER; note = thymine
  modified_base 1391..1392: mod_base = OTHER; note = thymine
  modified_base 1395: mod_base = OTHER; note = thymine
  modified_base 1398: mod_base = OTHER; note = thymine
  modified_base 1400..1401: mod_base = OTHER; note = thymine
  modified_base 1404: mod_base = OTHER; note = thymine
  modified_base 1407: mod_base = OTHER; note = thymine
  modified_base 1410: mod_base = OTHER; note = thymine
  modified_base 1415..1416: mod_base = OTHER; note = thymine
  modified_base 1419: mod_base = OTHER; note = thymine
  modified_base 1422: mod_base = OTHER; note = thymine
  modified_base 1425: mod_base = OTHER; note = thymine
  modified_base 1427..1428: mod_base = OTHER; note = thymine
  modified_base 1430..1431: mod_base = OTHER; note = thymine
  modified_base 1433..1434: mod_base = OTHER; note = thymine
  modified_base 1437: mod_base = OTHER; note = thymine
  modified_base 1440: mod_base = OTHER; note = thymine
  modified_base 1442..1444: mod_base = OTHER; note = thymine
  modified_base 1446: mod_base = OTHER; note = thymine
  modified_base 1452: mod_base = OTHER; note = thymine
  modified_base 1455: mod_base = OTHER; note = thymine
  modified_base 1460..1461: mod_base = OTHER; note = thymine
  modified_base 1463..1464: mod_base = OTHER; note = thymine
  modified_base 1467: mod_base = OTHER; note = thymine
  modified_base 1470: mod_base = OTHER; note = thymine
  modified_base 1472..1473: mod_base = OTHER; note = thymine
  modified_base 1475..1476: mod_base = OTHER; note = thymine
  modified_base 1479: mod_base = OTHER; note = thymine
  modified_base 1482..1483: mod_base = OTHER; note = thymine
  modified_base 1485: mod_base = OTHER; note = thymine
  modified_base 1488..1489: mod_base = OTHER; note = thymine
  modified_base 1491: mod_base = OTHER; note = thymine
  modified_base 1494: mod_base = OTHER; note = thymine
  modified_base 1497: mod_base = OTHER; note = thymine
  modified_base 1500: mod_base = OTHER; note = thymine
  modified_base 1502..1503: mod_base = OTHER; note = thymine
  modified_base 1506: mod_base = OTHER; note = thymine
  modified_base 1508..1509: mod_base = OTHER; note = thymine
  modified_base 1515: mod_base = OTHER; note = thymine
  modified_base 1518: mod_base = OTHER; note = thymine
  modified_base 1521: mod_base = OTHER; note = thymine
  modified_base 1526..1527: mod_base = OTHER; note = thymine
  modified_base 1530: mod_base = OTHER; note = thymine
  modified_base 1534: mod_base = OTHER; note = thymine
  modified_base 1536..1539: mod_base = OTHER; note = thymine
  modified_base 1545: mod_base = OTHER; note = thymine
  modified_base 1548: mod_base = OTHER; note = thymine
  modified_base 1556..1557: mod_base = OTHER; note = thymine
  modified_base 1566: mod_base = OTHER; note = thymine
  modified_base 1578: mod_base = OTHER; note = thymine
  modified_base 1581: mod_base = OTHER; note = thymine
  modified_base 1587: mod_base = OTHER; note = thymine
  modified_base 1590: mod_base = OTHER; note = thymine
  modified_base 1599: mod_base = OTHER; note = thymine
  modified_base 1602: mod_base = OTHER; note = thymine
  modified_base 1605: mod_base = OTHER; note = thymine
  modified_base 1609..1611: mod_base = OTHER; note = thymine
  modified_base 1614: mod_base = OTHER; note = thymine
  modified_base 1618: mod_base = OTHER; note = thymine
  modified_base 1620..1623: mod_base = OTHER; note = thymine
  modified_base 1626: mod_base = OTHER; note = thymine
  modified_base 1629..1632: mod_base = OTHER; note = thymine
  modified_base 1634..1635: mod_base = OTHER; note = thymine
  modified_base 1638: mod_base = OTHER; note = thymine
  modified_base 1644: mod_base = OTHER; note = thymine
  modified_base 1648: mod_base = OTHER; note = thymine
  modified_base 1650: mod_base = OTHER; note = thymine
  modified_base 1656: mod_base = OTHER; note = thymine
  modified_base 1658..1659: mod_base = OTHER; note = thymine
  modified_base 1661..1662: mod_base = OTHER; note = thymine
  modified_base 1667..1668: mod_base = OTHER; note = thymine
  modified_base 1671: mod_base = OTHER; note = thymine
  modified_base 1673..1675: mod_base = OTHER; note = thymine
  modified_base 1677: mod_base = OTHER; note = thymine
  modified_base 1689: mod_base = OTHER; note = thymine
  modified_base 1692: mod_base = OTHER; note = thymine
  modified_base 1696: mod_base = OTHER; note = thymine
  modified_base 1698: mod_base = OTHER; note = thymine
  modified_base 1700..1702: mod_base = OTHER; note = thymine
  modified_base 1704..1705: mod_base = OTHER; note = thymine
  modified_base 1707: mod_base = OTHER; note = thymine
  modified_base 1710: mod_base = OTHER; note = thymine
  modified_base 1718..1719: mod_base = OTHER; note = thymine
  modified_base 1722: mod_base = OTHER; note = thymine
  modified_base 1724..1725: mod_base = OTHER; note = thymine
  modified_base 1728: mod_base = OTHER; note = thymine
  modified_base 1731: mod_base = OTHER; note = thymine
  modified_base 1733..1734: mod_base = OTHER; note = thymine
  modified_base 1737: mod_base = OTHER; note = thymine
  modified_base 1746..1747: mod_base = OTHER; note = thymine
  modified_base 1749: mod_base = OTHER; note = thymine
  modified_base 1751..1752: mod_base = OTHER; note = thymine
  modified_base 1757..1758: mod_base = OTHER; note = thymine
  modified_base 1761: mod_base = OTHER; note = thymine
  modified_base 1764: mod_base = OTHER; note = thymine
  modified_base 1767: mod_base = OTHER; note = thymine
  modified_base 1769..1770: mod_base = OTHER; note = thymine
  modified_base 1773..1777: mod_base = OTHER; note = thymine
  modified_base 1779: mod_base = OTHER; note = thymine
  modified_base 1782: mod_base = OTHER; note = thymine
  modified_base 1785..1786: mod_base = OTHER; note = thymine
  modified_base 1791: mod_base = OTHER; note = thymine
  modified_base 1794..1795: mod_base = OTHER; note = thymine
  modified_base 1797..1800: mod_base = OTHER; note = thymine
  modified_base 1803: mod_base = OTHER; note = thymine
  modified_base 1806: mod_base = OTHER; note = thymine
  modified_base 1811..1812: mod_base = OTHER; note = thymine
  modified_base 1814..1815: mod_base = OTHER; note = thymine
  modified_base 1817..1818: mod_base = OTHER; note = thymine
  modified_base 1820..1821: mod_base = OTHER; note = thymine
  modified_base 1824..1825: mod_base = OTHER; note = thymine
  modified_base 1827: mod_base = OTHER; note = thymine
  modified_base 1833: mod_base = OTHER; note = thymine
  modified_base 1839: mod_base = OTHER; note = thymine
  modified_base 1845: mod_base = OTHER; note = thymine
  modified_base 1848: mod_base = OTHER; note = thymine
  modified_base 1854: mod_base = OTHER; note = thymine
  modified_base 1857..1858: mod_base = OTHER; note = thymine
  modified_base 1860: mod_base = OTHER; note = thymine
  modified_base 1864: mod_base = OTHER; note = thymine
  modified_base 1866..1869: mod_base = OTHER; note = thymine
  modified_base 1872: mod_base = OTHER; note = thymine
  modified_base 1875: mod_base = OTHER; note = thymine
  modified_base 1881: mod_base = OTHER; note = thymine
  modified_base 1884..1885: mod_base = OTHER; note = thymine
  modified_base 1887: mod_base = OTHER; note = thymine
  modified_base 1890: mod_base = OTHER; note = thymine
  modified_base 1894: mod_base = OTHER; note = thymine
  modified_base 1903..1905: mod_base = OTHER; note = thymine
  modified_base 1911: mod_base = OTHER; note = thymine
  modified_base 1914: mod_base = OTHER; note = thymine
  modified_base 1916..1917: mod_base = OTHER; note = thymine
  modified_base 1923..1924: mod_base = OTHER; note = thymine
  modified_base 1926: mod_base = OTHER; note = thymine
  modified_base 1929..1932: mod_base = OTHER; note = thymine
  modified_base 1935: mod_base = OTHER; note = thymine
  modified_base 1938..1939: mod_base = OTHER; note = thymine
  modified_base 1941: mod_base = OTHER; note = thymine
  modified_base 1953: mod_base = OTHER; note = thymine
  modified_base 1955..1956: mod_base = OTHER; note = thymine
  modified_base 1958..1959: mod_base = OTHER; note = thymine
  modified_base 1961..1962: mod_base = OTHER; note = thymine
  modified_base 1969..1971: mod_base = OTHER; note = thymine
  modified_base 1974: mod_base = OTHER; note = thymine
  modified_base 1980: mod_base = OTHER; note = thymine
  modified_base 1983..1986: mod_base = OTHER; note = thymine
  modified_base 1995: mod_base = OTHER; note = thymine
  modified_base 1998: mod_base = OTHER; note = thymine
  modified_base 2000..2001: mod_base = OTHER; note = thymine
  modified_base 2004: mod_base = OTHER; note = thymine
  modified_base 2007: mod_base = OTHER; note = thymine
  modified_base 2010: mod_base = OTHER; note = thymine
  modified_base 2013..2014: mod_base = OTHER; note = thymine
  modified_base 2016: mod_base = OTHER; note = thymine
  modified_base 2018..2019: mod_base = OTHER; note = thymine
  modified_base 2022: mod_base = OTHER; note = thymine
  modified_base 2025..2028: mod_base = OTHER; note = thymine
  modified_base 2030..2032: mod_base = OTHER; note = thymine
  modified_base 2034: mod_base = OTHER; note = thymine
  modified_base 2038..2040: mod_base = OTHER; note = thymine
  modified_base 2042..2043: mod_base = OTHER; note = thymine
  modified_base 2046: mod_base = OTHER; note = thymine
  modified_base 2049: mod_base = OTHER; note = thymine
  modified_base 2052: mod_base = OTHER; note = thymine
  modified_base 2054: mod_base = OTHER; note = thymine
  modified_base 2058: mod_base = OTHER; note = thymine
  modified_base 2060..2061: mod_base = OTHER; note = thymine
  modified_base 2064: mod_base = OTHER; note = thymine
  modified_base 2067: mod_base = OTHER; note = thymine
  modified_base 2073: mod_base = OTHER; note = thymine
  modified_base 2082: mod_base = OTHER; note = thymine
  modified_base 2084..2088: mod_base = OTHER; note = thymine
  modified_base 2091..2092: mod_base = OTHER; note = thymine
  modified_base 2094: mod_base = OTHER; note = thymine
  modified_base 2097: mod_base = OTHER; note = thymine
  modified_base 2100: mod_base = OTHER; note = thymine
  modified_base 2105..2106: mod_base = OTHER; note = thymine
  modified_base 2109: mod_base = OTHER; note = thymine
  modified_base 2112: mod_base = OTHER; note = thymine
  modified_base 2114..2115: mod_base = OTHER; note = thymine
  modified_base 2117..2118: mod_base = OTHER; note = thymine
  modified_base 2121: mod_base = OTHER; note = thymine
  modified_base 2124..2128: mod_base = OTHER; note = thymine
  modified_base 2133: mod_base = OTHER; note = thymine
  modified_base 2135..2136: mod_base = OTHER; note = thymine
  modified_base 2139: mod_base = OTHER; note = thymine
  modified_base 2144..2145: mod_base = OTHER; note = thymine
  modified_base 2148: mod_base = OTHER; note = thymine
  modified_base 2151: mod_base = OTHER; note = thymine
  modified_base 2157: mod_base = OTHER; note = thymine
  modified_base 2160: mod_base = OTHER; note = thymine
  modified_base 2163: mod_base = OTHER; note = thymine
  modified_base 2166: mod_base = OTHER; note = thymine
  modified_base 2169: mod_base = OTHER; note = thymine
  modified_base 2172: mod_base = OTHER; note = thymine
  modified_base 2174..2175: mod_base = OTHER; note = thymine
  modified_base 2178: mod_base = OTHER; note = thymine
  modified_base 2181: mod_base = OTHER; note = thymine
  modified_base 2183..2184: mod_base = OTHER; note = thymine
  modified_base 2186..2187: mod_base = OTHER; note = thymine
  modified_base 2189..2190: mod_base = OTHER; note = thymine
  modified_base 2193..2194: mod_base = OTHER; note = thymine
  modified_base 2196..2197: mod_base = OTHER; note = thymine
  modified_base 2199: mod_base = OTHER; note = thymine
  modified_base 2202: mod_base = OTHER; note = thymine
  modified_base 2204..2205: mod_base = OTHER; note = thymine
  modified_base 2208: mod_base = OTHER; note = thymine
  modified_base 2210: mod_base = OTHER; note = thymine
  modified_base 2222..2223: mod_base = OTHER; note = thymine
  modified_base 2226: mod_base = OTHER; note = thymine
  modified_base 2229..2232: mod_base = OTHER; note = thymine
  modified_base 2234..2235: mod_base = OTHER; note = thymine
  modified_base 2238..2239: mod_base = OTHER; note = thymine
  modified_base 2241: mod_base = OTHER; note = thymine
  modified_base 2249: mod_base = OTHER; note = thymine
  modified_base 2253: mod_base = OTHER; note = thymine
  modified_base 2256..2259: mod_base = OTHER; note = thymine
  modified_base 2262: mod_base = OTHER; note = thymine
  modified_base 2265: mod_base = OTHER; note = thymine
  modified_base 2271: mod_base = OTHER; note = thymine
  modified_base 2273..2274: mod_base = OTHER; note = thymine
  modified_base 2277: mod_base = OTHER; note = thymine
  modified_base 2286: mod_base = OTHER; note = thymine
  modified_base 2289: mod_base = OTHER; note = thymine
  modified_base 2294..2295: mod_base = OTHER; note = thymine
  modified_base 2297..2298: mod_base = OTHER; note = thymine
  modified_base 2301: mod_base = OTHER; note = thymine
  modified_base 2310: mod_base = OTHER; note = thymine
  modified_base 2313..2316: mod_base = OTHER; note = thymine
  modified_base 2319: mod_base = OTHER; note = thymine
  modified_base 2325..2326: mod_base = OTHER; note = thymine
  modified_base 2332..2337: mod_base = OTHER; note = thymine
  modified_base 2340: mod_base = OTHER; note = thymine
  modified_base 2348..2349: mod_base = OTHER; note = thymine
  modified_base 2351: mod_base = OTHER; note = thymine
  modified_base 2354..2355: mod_base = OTHER; note = thymine
  modified_base 2358: mod_base = OTHER; note = thymine
  modified_base 2360..2364: mod_base = OTHER; note = thymine
  modified_base 2367: mod_base = OTHER; note = thymine
  modified_base 2373: mod_base = OTHER; note = thymine
  modified_base 2376: mod_base = OTHER; note = thymine
  modified_base 2379: mod_base = OTHER; note = thymine
  modified_base 2385: mod_base = OTHER; note = thymine
  modified_base 2389..2391: mod_base = OTHER; note = thymine
  modified_base 2400: mod_base = OTHER; note = thymine
  modified_base 2403: mod_base = OTHER; note = thymine
  modified_base 2406: mod_base = OTHER; note = thymine
  modified_base 2409: mod_base = OTHER; note = thymine
  modified_base 2417..2418: mod_base = OTHER; note = thymine
  modified_base 2421: mod_base = OTHER; note = thymine
  modified_base 2424: mod_base = OTHER; note = thymine
  modified_base 2426..2427: mod_base = OTHER; note = thymine
  modified_base 2429..2430: mod_base = OTHER; note = thymine
  modified_base 2433: mod_base = OTHER; note = thymine
  modified_base 2441..2443: mod_base = OTHER; note = thymine
  modified_base 2445..2446: mod_base = OTHER; note = thymine
  modified_base 2448: mod_base = OTHER; note = thymine
  modified_base 2451: mod_base = OTHER; note = thymine
  modified_base 2454: mod_base = OTHER; note = thymine
  modified_base 2460: mod_base = OTHER; note = thymine
  modified_base 2462..2463: mod_base = OTHER; note = thymine
  modified_base 2466: mod_base = OTHER; note = thymine
  modified_base 2470: mod_base = OTHER; note = thymine
  modified_base 2472: mod_base = OTHER; note = thymine
  modified_base 2474..2475: mod_base = OTHER; note = thymine
  modified_base 2478: mod_base = OTHER; note = thymine
  modified_base 2481: mod_base = OTHER; note = thymine
  modified_base 2483..2487: mod_base = OTHER; note = thymine
  modified_base 2489..2491: mod_base = OTHER; note = thymine
  modified_base 2493: mod_base = OTHER; note = thymine
  modified_base 2496: mod_base = OTHER; note = thymine
  modified_base 2499: mod_base = OTHER; note = thymine
  modified_base 2502: mod_base = OTHER; note = thymine
  modified_base 2505: mod_base = OTHER; note = thymine
  modified_base 2508: mod_base = OTHER; note = thymine
  modified_base 2513: mod_base = OTHER; note = thymine
  modified_base 2515: mod_base = OTHER; note = thymine
  modified_base 2517: mod_base = OTHER; note = thymine
  modified_base 2520: mod_base = OTHER; note = thymine
  modified_base 2526: mod_base = OTHER; note = thymine
  modified_base 2529: mod_base = OTHER; note = thymine
  modified_base 2531: mod_base = OTHER; note = thymine
  modified_base 2538: mod_base = OTHER; note = thymine
  modified_base 2540..2541: mod_base = OTHER; note = thymine
  modified_base 2545: mod_base = OTHER; note = thymine
  modified_base 2547: mod_base = OTHER; note = thymine
  modified_base 2550: mod_base = OTHER; note = thymine
  modified_base 2556: mod_base = OTHER; note = thymine
  modified_base 2558..2559: mod_base = OTHER; note = thymine
  modified_base 2562: mod_base = OTHER; note = thymine
  modified_base 2568: mod_base = OTHER; note = thymine
  modified_base 2570..2572: mod_base = OTHER; note = thymine
  modified_base 2574: mod_base = OTHER; note = thymine
  modified_base 2576..2577: mod_base = OTHER; note = thymine
  modified_base 2579..2580: mod_base = OTHER; note = thymine
  modified_base 2583: mod_base = OTHER; note = thymine
  modified_base 2585..2586: mod_base = OTHER; note = thymine
  modified_base 2589: mod_base = OTHER; note = thymine
  modified_base 2591..2592: mod_base = OTHER; note = thymine
  modified_base 2595: mod_base = OTHER; note = thymine
  modified_base 2600..2601: mod_base = OTHER; note = thymine
  modified_base 2606..2607: mod_base = OTHER; note = thymine
  modified_base 2613: mod_base = OTHER; note = thymine
  modified_base 2615..2616: mod_base = OTHER; note = thymine
  modified_base 2624: mod_base = OTHER; note = thymine
  modified_base 2627..2628: mod_base = OTHER; note = thymine
  modified_base 2631: mod_base = OTHER; note = thymine
  modified_base 2634: mod_base = OTHER; note = thymine
  modified_base 2640: mod_base = OTHER; note = thymine
  modified_base 2646: mod_base = OTHER; note = thymine
  modified_base 2651..2653: mod_base = OTHER; note = thymine
  modified_base 2655: mod_base = OTHER; note = thymine
  modified_base 2661: mod_base = OTHER; note = thymine
  modified_base 2663..2664: mod_base = OTHER; note = thymine
  modified_base 2670: mod_base = OTHER; note = thymine
  modified_base 2673: mod_base = OTHER; note = thymine
  modified_base 2675..2676: mod_base = OTHER; note = thymine
  modified_base 2682: mod_base = OTHER; note = thymine
  modified_base 2685: mod_base = OTHER; note = thymine
  modified_base 2691: mod_base = OTHER; note = thymine
  modified_base 2694: mod_base = OTHER; note = thymine
  modified_base 2697: mod_base = OTHER; note = thymine
  modified_base 2700: mod_base = OTHER; note = thymine
  modified_base 2706..2709: mod_base = OTHER; note = thymine
  modified_base 2712: mod_base = OTHER; note = thymine
  modified_base 2718..2722: mod_base = OTHER; note = thymine
  modified_base 2724: mod_base = OTHER; note = thymine
  modified_base 2728: mod_base = OTHER; note = thymine
  modified_base 2730: mod_base = OTHER; note = thymine
  modified_base 2733: mod_base = OTHER; note = thymine
  modified_base 2739: mod_base = OTHER; note = thymine
  modified_base 2742: mod_base = OTHER; note = thymine
  modified_base 2745: mod_base = OTHER; note = thymine
  modified_base 2748: mod_base = OTHER; note = thymine
  modified_base 2751: mod_base = OTHER; note = thymine
  modified_base 2759..2760: mod_base = OTHER; note = thymine
  modified_base 2766: mod_base = OTHER; note = thymine
  modified_base 2768..2769: mod_base = OTHER; note = thymine
  modified_base 2772: mod_base = OTHER; note = thymine
  modified_base 2774..2775: mod_base = OTHER; note = thymine
  modified_base 2783..2784: mod_base = OTHER; note = thymine
  modified_base 2793: mod_base = OTHER; note = thymine
  modified_base 2796: mod_base = OTHER; note = thymine
  modified_base 2798..2800: mod_base = OTHER; note = thymine
  modified_base 2804..2805: mod_base = OTHER; note = thymine
  modified_base 2808: mod_base = OTHER; note = thymine
  modified_base 2811: mod_base = OTHER; note = thymine
  modified_base 2814: mod_base = OTHER; note = thymine
  modified_base 2817: mod_base = OTHER; note = thymine
  modified_base 2820: mod_base = OTHER; note = thymine
  modified_base 2822..2823: mod_base = OTHER; note = thymine
  modified_base 2826: mod_base = OTHER; note = thymine
  modified_base 2829: mod_base = OTHER; note = thymine
  modified_base 2832: mod_base = OTHER; note = thymine
  modified_base 2835: mod_base = OTHER; note = thymine
  modified_base 2838: mod_base = OTHER; note = thymine
  modified_base 2840: mod_base = OTHER; note = thymine
  modified_base 2843..2844: mod_base = OTHER; note = thymine
  modified_base 2847: mod_base = OTHER; note = thymine
  modified_base 2849..2850: mod_base = OTHER; note = thymine
  modified_base 2853: mod_base = OTHER; note = thymine
  modified_base 2855..2859: mod_base = OTHER; note = thymine
  modified_base 2868: mod_base = OTHER; note = thymine
  modified_base 2871: mod_base = OTHER; note = thymine
  modified_base 2875: mod_base = OTHER; note = thymine
  modified_base 2877..2878: mod_base = OTHER; note = thymine
  modified_base 2880: mod_base = OTHER; note = thymine
  modified_base 2882..2883: mod_base = OTHER; note = thymine
  modified_base 2885..2886: mod_base = OTHER; note = thymine
  modified_base 2889: mod_base = OTHER; note = thymine
  modified_base 2891..2893: mod_base = OTHER; note = thymine
  modified_base 2895..2896: mod_base = OTHER; note = thymine
  modified_base 2898..2899: mod_base = OTHER; note = thymine
  modified_base 2906..2907: mod_base = OTHER; note = thymine
  modified_base 2910: mod_base = OTHER; note = thymine
  modified_base 2916: mod_base = OTHER; note = thymine
  modified_base 2918..2919: mod_base = OTHER; note = thymine
  modified_base 2921..2922: mod_base = OTHER; note = thymine
  modified_base 2925: mod_base = OTHER; note = thymine
  modified_base 2928: mod_base = OTHER; note = thymine
  modified_base 2931: mod_base = OTHER; note = thymine
  modified_base 2934: mod_base = OTHER; note = thymine
  modified_base 2936..2937: mod_base = OTHER; note = thymine
  modified_base 2939..2940: mod_base = OTHER; note = thymine
  modified_base 2943..2944: mod_base = OTHER; note = thymine
  modified_base 2946: mod_base = OTHER; note = thymine
  modified_base 2949: mod_base = OTHER; note = thymine
  modified_base 2952: mod_base = OTHER; note = thymine
  modified_base 2961..2962: mod_base = OTHER; note = thymine
  modified_base 2967: mod_base = OTHER; note = thymine
  modified_base 2969..2970: mod_base = OTHER; note = thymine
  modified_base 2972..2973: mod_base = OTHER; note = thymine
  modified_base 2976: mod_base = OTHER; note = thymine
  modified_base 2980: mod_base = OTHER; note = thymine
  modified_base 2982..2985: mod_base = OTHER; note = thymine
  modified_base 2988..2991: mod_base = OTHER; note = thymine
  modified_base 2995..2997: mod_base = OTHER; note = thymine
  modified_base 2999..3000: mod_base = OTHER; note = thymine
  modified_base 3002..3004: mod_base = OTHER; note = thymine
  modified_base 3006..3007: mod_base = OTHER; note = thymine
  modified_base 3009: mod_base = OTHER; note = thymine
  modified_base 3012: mod_base = OTHER; note = thymine
  modified_base 3015: mod_base = OTHER; note = thymine
  modified_base 3017..3018: mod_base = OTHER; note = thymine
  modified_base 3020..3021: mod_base = OTHER; note = thymine
  modified_base 3026..3027: mod_base = OTHER; note = thymine
  modified_base 3032..3033: mod_base = OTHER; note = thymine
  modified_base 3042..3043: mod_base = OTHER; note = thymine
  modified_base 3045..3048: mod_base = OTHER; note = thymine
  modified_base 3050..3051: mod_base = OTHER; note = thymine
  modified_base 3054..3055: mod_base = OTHER; note = thymine
  modified_base 3057..3061: mod_base = OTHER; note = thymine
  modified_base 3063: mod_base = OTHER; note = thymine
  modified_base 3066: mod_base = OTHER; note = thymine
  modified_base 3068..3069: mod_base = OTHER; note = thymine
  modified_base 3072: mod_base = OTHER; note = thymine
  modified_base 3075: mod_base = OTHER; note = thymine
  modified_base 3078: mod_base = OTHER; note = thymine
  modified_base 3081: mod_base = OTHER; note = thymine
  modified_base 3084: mod_base = OTHER; note = thymine
  modified_base 3087: mod_base = OTHER; note = thymine
  modified_base 3089..3091: mod_base = OTHER; note = thymine
  modified_base 3093: mod_base = OTHER; note = thymine
  modified_base 3095..3096: mod_base = OTHER; note = thymine
  modified_base 3099: mod_base = OTHER; note = thymine
  modified_base 3105: mod_base = OTHER; note = thymine
  modified_base 3108: mod_base = OTHER; note = thymine
  modified_base 3110..3111: mod_base = OTHER; note = thymine
  modified_base 3118: mod_base = OTHER; note = thymine
  modified_base 3120: mod_base = OTHER; note = thymine
  modified_base 3126: mod_base = OTHER; note = thymine
  modified_base 3132: mod_base = OTHER; note = thymine
  modified_base 3135: mod_base = OTHER; note = thymine
  modified_base 3137: mod_base = OTHER; note = thymine
  modified_base 3141: mod_base = OTHER; note = thymine
  modified_base 3144: mod_base = OTHER; note = thymine
  modified_base 3146..3147: mod_base = OTHER; note = thymine
  modified_base 3150: mod_base = OTHER; note = thymine
  modified_base 3152..3153: mod_base = OTHER; note = thymine
  modified_base 3159: mod_base = OTHER; note = thymine
  modified_base 3162: mod_base = OTHER; note = thymine
  modified_base 3164..3166: mod_base = OTHER; note = thymine
  modified_base 3168..3171: mod_base = OTHER; note = thymine
  modified_base 3178: mod_base = OTHER; note = thymine
  modified_base 3180: mod_base = OTHER; note = thymine
  modified_base 3185..3186: mod_base = OTHER; note = thymine
  modified_base 3189: mod_base = OTHER; note = thymine
  modified_base 3194: mod_base = OTHER; note = thymine
  modified_base 3198: mod_base = OTHER; note = thymine
  modified_base 3206..3207: mod_base = OTHER; note = thymine
  modified_base 3210: mod_base = OTHER; note = thymine
  modified_base 3213..3214: mod_base = OTHER; note = thymine
  modified_base 3216: mod_base = OTHER; note = thymine
  modified_base 3219: mod_base = OTHER; note = thymine
  modified_base 3221..3222: mod_base = OTHER; note = thymine
  modified_base 3231: mod_base = OTHER; note = thymine
  modified_base 3234: mod_base = OTHER; note = thymine
  modified_base 3237: mod_base = OTHER; note = thymine
  modified_base 3239..3240: mod_base = OTHER; note = thymine
  modified_base 3243: mod_base = OTHER; note = thymine
  misc_feature 1..3246: note = Synthetic
  source 1..3246: mol_type = other RNA
atggctgcttttaagcctaatcctattaattatattcttggtcttgatattggtattgcttctgttggttgggctatggttgagattgatgaggaggagaatcctattcgtcttattgatcttggtgttcgtgtttttgagcgtgctgaggttcctaagactggtgattctcttgctatggctcgtcgtcttgctcgttctgttcgtcgtcttactcgtcgtcgtgctcatcgtcttcttcgtgctcgtcgtcttcttaagcgtgagggtgttcttcaggctgctgattttgatgagaatggtcttattaagtctcttcctaatactccttggcagcttcgtgctgctgctcttgatcgtaagcttactcctcttgagtggtctgctgttcttcttcatcttattaagcatcgtggttatctttctcagcgtaagaatgagggtgagactgctgataaggagcttggtgctcttcttaagggtgttgctgataatgctcatgctcttcagactggtgattttcgtactcctgctgagcttgctcttaataagtttgagaaggagtgtggtcatattcgtaatcagcgtggtgattattctcatactttttctcgtaaggatcttcaggctgagcttaatcttctttttgagaagcagaaggagtttggtaatcctcatgtttctggtggtcttaaggagggtattgagactcttcttatgactcagcgtcctgctctttctggtgatgctgttcagaagatgcttggtcattgtacttttgagcctgctgagcctaaggctgctaagaatacttatactgctgagcgttttatttggcttactaagcttaataatcttcgtattcttgagcagggttctgagcgtcctcttactgatactgagcgtgctactcttatggatgagccttatcgtaagtctaagcttacttatgctcaggctcgtaagcttctttctcttgaggatactgctttttttaagggtcttcgttatggtaaggataatgctgaggcttctactcttatggagatgaaggcttatcatactatttctcgtgctcttgagaaggagggtcttaaggataagaagtctcctcttaatctttctcctgagcttcaggatgagattggtactgctttttctctttttaagactgatgaggatattactggtcgtcttaaggatcgtattcagcctgagattcttgaggctcttcttaagcatatttcttttgataagtttgttcagatttctcttaaggctcttcgtcgtattgttcctcttatggagcagggtaagcgttatgatgaggcttgtgctgagatttatggtgatcattatggtaagaagaatactgaggagaagatttatcttcctcctattcctgctgatgagattcgtaatcctgttgttcttcgtgctctttctcaggctcgtaaggttattaatggtgttgttcgtcgttatggttctcctgctcgtattcatattgagactgctcgtgaggttggtaagtcttttaaggatcgtaaggagattgagaagcgtcaggaggagaatcgtaaggatcgtgagaaggctgctgctaagtttcgtgagtattttcctaattttgttggtgagcctaagtctaaggatattcttaagcttcgtctttatgagcagcagcatggtaagtgtctttattctggtaaggagattaatcttggtcgtcttaatgagaagggttatgttgagattgatcatgctcttcctttttctcgtacttgggatgattcttttaataataaggttcttgttcttggttctgagaatcagaataagggtaatcagactccttatgagtattttaatggtaaggataattctcgtgagtggcaggagtttaaggctcgtgttgagacttctcgttttcctcgttctaagaagcagcgtattcttcttcagaagtttgatgaggatggttttaaggagcgtaatcttaatgatactcgttatgttaatcgttttctttgtcagtttgttgctgatcgtatgcgtcttactggtaagggtaagaagcgtgtttttgcttctaatggtcagattactaatcttcttcgtggtttttggggtcttcgtaaggttcgtgctgagaatgatcgtcatcatgctcttgatgctgttgttgttgcttgttctactgttgctatgcagcagaagattactcgttttgttcgttataaggagatgaatgcttttgatggtaagactattgataaggagactggtgaggttcttcatcagaagactcattttcctcagccttgggagttttttgctcaggaggttatgattcgtgtttttggtaagcctgatggtaagcctgagtttgaggaggctgatactcctgagaagcttcgtactcttcttgctgagaagctttcttctcgtcctgaggctgttcatgagtatgttactcctctttttgtttctcgtgctcctaatcgtaagatgtctggtcagggtcatatggagactgttaagtctgctaagcgtcttgatgagggtgtttctgttcttcgtgttcctcttactcagcttaagcttaaggatcttgagaagatggttaatcgtgagcgtgagcctaagctttatgaggctcttaaggctcgtcttgaggctcataaggatgatcctgctaaggcttttgctgagcctttttataagtatgataaggctggtaatcgtactcagcaggttaaggctgttcgtgttgagcaggttcagaagactggtgtttgggttcgtaatcataatggtattgctgataatgctactatggttcgtgttgatgtttttgagaagggtgataagtattatcttgttcctatttattcttggcaggttgctaagggtattcttcctgatcgtgctgttgttgcttatgctgatgaggaggattggactgttattgatgagtcttttcgttttaagtttgttctttattctaatgatcttattaaggttcagcttaagaaggattcttttcttggttatttttctggtcttgatcgtgctactggtgctatttctcttcgtgagcatgatcttgagaagtctaagggtaaggatggtatgcatcgtattggtgttaagactgctctttcttttcagaagtatcagattgatgagatgggtaaggagattcgtccttgtcgtcttaagaagcgtcctcctgttcgttga

SEQ ID NO: 281 - RNA, 3246 nt, synthetic construct
  modified_base 2: mod_base = OTHER; note = thymine
  modified_base 10..11: mod_base = OTHER; note = thymine
  modified_base 26: mod_base = OTHER; note = thymine
  modified_base 31: mod_base = OTHER; note = thymine
  modified_base 35: mod_base = OTHER; note = thymine
  modified_base 38: mod_base = OTHER; note = thymine
  modified_base 44: mod_base = OTHER; note = thymine
  modified_base 50: mod_base = OTHER; note = thymine
  modified_base 56: mod_base = OTHER; note = thymine
  modified_base 61: mod_base = OTHER; note = thymine
  modified_base 65: mod_base = OTHER; note = thymine
  modified_base 70: mod_base = OTHER; note = thymine
  modified_base 77: mod_base = OTHER; note = thymine
  modified_base 80: mod_base = OTHER; note = thymine
  modified_base 86: mod_base = OTHER; note = thymine
  modified_base 107: mod_base = OTHER; note = thymine
  modified_base 113: mod_base = OTHER; note = thymine
  modified_base 116: mod_base = OTHER; note = thymine
  modified_base 122: mod_base = OTHER; note = thymine
  modified_base 128: mod_base = OTHER; note = thymine
  modified_base 134: mod_base = OTHER; note = thymine
  modified_base 136..137: mod_base = OTHER; note = thymine
  modified_base 152: mod_base = OTHER; note = thymine
  modified_base 169: mod_base = OTHER; note = thymine
  modified_base 173: mod_base = OTHER; note = thymine
  modified_base 179: mod_base = OTHER; note = thymine
  modified_base 191: mod_base = OTHER; note = thymine
  modified_base 199: mod_base = OTHER; note = thymine
  modified_base 203: mod_base = OTHER; note = thymine
  modified_base 212: mod_base = OTHER; note = thymine
  modified_base 236: mod_base = OTHER; note = thymine
  modified_base 239: mod_base = OTHER; note = thymine
  modified_base 254: mod_base = OTHER; note = thymine
  modified_base 257: mod_base = OTHER; note = thymine
  modified_base 272: mod_base = OTHER; note = thymine
  modified_base 275: mod_base = OTHER; note = thymine
  modified_base 289..290: mod_base = OTHER; note = thymine
  modified_base 305: mod_base = OTHER; note = thymine
  modified_base 308: mod_base = OTHER; note = thymine
  modified_base 313: mod_base = OTHER; note = thymine
  modified_base 317: mod_base = OTHER; note = thymine
  modified_base 331: mod_base = OTHER; note = thymine
  modified_base 338: mod_base = OTHER; note = thymine
  modified_base 353: mod_base = OTHER; note = thymine
  modified_base 365: mod_base = OTHER; note = thymine
  modified_base 374: mod_base = OTHER; note = thymine
  modified_base 379: mod_base = OTHER; note = thymine
  modified_base 382: mod_base = OTHER; note = thymine
  modified_base 389: mod_base = OTHER; note = thymine
  modified_base 392: mod_base = OTHER; note = thymine
  modified_base 395: mod_base = OTHER; note = thymine
  modified_base 401: mod_base = OTHER; note = thymine
  modified_base 404: mod_base = OTHER; note = thymine
  modified_base 418: mod_base = OTHER; note = thymine
  modified_base 422: mod_base = OTHER; note = thymine
  modified_base 424: mod_base = OTHER; note = thymine
  modified_base 464: mod_base = OTHER; note = thymine
  modified_base 473: mod_base = OTHER; note = thymine
  modified_base 476: mod_base = OTHER; note = thymine
  modified_base 485: mod_base = OTHER; note = thymine
  modified_base 506: mod_base = OTHER; note = thymine
  modified_base 520..521: mod_base = OTHER; note = thymine
  modified_base 539: mod_base = OTHER; note = thymine
  modified_base 545: mod_base = OTHER; note = thymine
  modified_base 553..554: mod_base = OTHER; note = thymine
  modified_base 565: mod_base = OTHER; note = thymine
  modified_base 575: mod_base = OTHER; note = thymine
  modified_base 595: mod_base = OTHER; note = thymine
  modified_base 598: mod_base = OTHER; note = thymine
  modified_base 607..608: mod_base = OTHER; note = thymine
  modified_base 610: mod_base = OTHER; note = thymine
  modified_base 623: mod_base = OTHER; note = thymine
  modified_base 635: mod_base = OTHER; note = thymine
  modified_base 641: mod_base = OTHER; note = thymine
  modified_base 644: mod_base = OTHER; note = thymine
  modified_base 646..647: mod_base = OTHER; note = thymine
  modified_base 664..665: mod_base = OTHER; note = thymine
  modified_base 680: mod_base = OTHER; note = thymine
  modified_base 682: mod_base = OTHER; note = thymine
  modified_base 692: mod_base = OTHER; note = thymine
  modified_base 704: mod_base = OTHER; note = thymine
  modified_base 713: mod_base = OTHER; note = thymine
  modified_base 716: mod_base = OTHER; note = thymine
  modified_base 719: mod_base = OTHER; note = thymine
  modified_base 737: mod_base = OTHER; note = thymine
  modified_base 739: mod_base = OTHER; note = thymine
  modified_base 752: mod_base = OTHER; note = thymine
  modified_base 761: mod_base = OTHER; note = thymine
  modified_base 764: mod_base = OTHER; note = thymine
  modified_base 772: mod_base = OTHER; note = thymine
  modified_base 778..779: mod_base = OTHER; note = thymine
  modified_base 814: mod_base = OTHER; note = thymine
  modified_base 829..830: mod_base = OTHER; note = thymine
  modified_base 833: mod_base = OTHER; note = thymine
  modified_base 835: mod_base = OTHER; note = thymine
  modified_base 839: mod_base = OTHER; note = thymine
  modified_base 848: mod_base = OTHER; note = thymine
  modified_base 857: mod_base = OTHER; note = thymine
  modified_base 863: mod_base = OTHER; note = thymine
  modified_base 866: mod_base = OTHER; note = thymine
  modified_base 877: mod_base = OTHER; note = thymine
  modified_base 890: mod_base = OTHER; note = thymine
  modified_base 914: mod_base = OTHER; note = thymine
  modified_base 917: mod_base = OTHER; note = thymine
  modified_base 928: mod_base = OTHER; note = thymine
  modified_base 937: mod_base = OTHER; note = thymine
  modified_base 944: mod_base = OTHER; note = thymine
  modified_base 949: mod_base = OTHER; note = thymine
  modified_base 968: mod_base = OTHER; note = thymine
  modified_base 971: mod_base = OTHER; note = thymine
  modified_base 973: mod_base = OTHER; note = thymine
  modified_base 977: mod_base = OTHER; note = thymine
  modified_base 991..992: mod_base = OTHER; note = thymine
  modified_base 994..995: mod_base = OTHER; note = thymine
  modified_base 1004: mod_base = OTHER; note = thymine
  modified_base 1009: mod_base = OTHER; note = thymine
  modified_base 1033: mod_base = OTHER; note = thymine
  modified_base 1040: mod_base = OTHER; note = thymine
  modified_base 1043: mod_base = OTHER; note = thymine
  modified_base 1049: mod_base = OTHER; note = thymine
  modified_base 1057: mod_base = OTHER; note = thymine
  modified_base 1067: mod_base = OTHER; note = thymine
  modified_base 1069: mod_base = OTHER; note = thymine
  modified_base 1079: mod_base = OTHER; note = thymine
  modified_base 1094: mod_base = OTHER; note = thymine
  modified_base 1108: mod_base = OTHER; note = thymine
  modified_base 1115: mod_base = OTHER; note = thymine
  modified_base 1121: mod_base = OTHER; note = thymine
  modified_base 1123: mod_base = OTHER; note = thymine
  modified_base 1133: mod_base = OTHER; note = thymine
  modified_base 1145: mod_base = OTHER; note = thymine
  modified_base 1156..1157: mod_base = OTHER; note = thymine
  modified_base 1159: mod_base = OTHER; note = thymine
  modified_base 1163: mod_base = OTHER; note = thymine
  modified_base 1165..1166: mod_base = OTHER; note = thymine
  modified_base 1184: mod_base = OTHER; note = thymine
  modified_base 1196: mod_base = OTHER; note = thymine
  modified_base 1208: mod_base = OTHER; note = thymine
  modified_base 1220: mod_base = OTHER; note = thymine
  modified_base 1223: mod_base = OTHER; note = thymine
  modified_base 1232: mod_base = OTHER; note = thymine
  modified_base 1235: mod_base = OTHER; note = thymine
  modified_base 1244: mod_base = OTHER; note = thymine
  modified_base 1246: mod_base = OTHER; note = thymine
  modified_base 1249..1250: mod_base = OTHER; note = thymine
  modified_base 1258..1259: mod_base = OTHER; note = thymine
  modified_base 1262: mod_base = OTHER; note = thymine
  modified_base 1268: mod_base = OTHER; note = thymine
  modified_base 1270: mod_base = OTHER; note = thymine
  modified_base 1274: mod_base = OTHER; note = thymine
  modified_base 1283: mod_base = OTHER; note = thymine
  modified_base 1292: mod_base = OTHER; note = thymine
  modified_base 1295: mod_base = OTHER; note = thymine
  modified_base 1301: mod_base = OTHER; note = thymine
  modified_base 1304: mod_base = OTHER; note = thymine
  modified_base 1321: mod_base = OTHER; note = thymine
  modified_base 1333: mod_base = OTHER; note = thymine
  modified_base 1343: mod_base = OTHER; note = thymine
  modified_base 1345: mod_base = OTHER; note = thymine
  modified_base 1357: mod_base = OTHER; note = thymine
  modified_base 1385: mod_base = OTHER; note = thymine
  modified_base 1387: mod_base = OTHER; note = thymine
  modified_base 1391: mod_base = OTHER; note = thymine
  modified_base 1400: mod_base = OTHER; note = thymine
  modified_base 1415: mod_base = OTHER; note = thymine
  modified_base 1427: mod_base = OTHER; note = thymine
  modified_base 1430: mod_base = OTHER; note = thymine
  modified_base 1433: mod_base = OTHER; note = thymine
  modified_base 1442: mod_base = OTHER; note = thymine
  modified_base 1444: mod_base = OTHER; note = thymine
  modified_base 1460: mod_base = OTHER; note = thymine
  modified_base 1463: mod_base = OTHER; note = thymine
  modified_base 1472: mod_base = OTHER; note = thymine
  modified_base 1475: mod_base = OTHER; note = thymine
  modified_base 1483: mod_base = OTHER; note = thymine
  modified_base 1489: mod_base = OTHER; note = thymine
  modified_base 1502: mod_base = OTHER; note = thymine
  modified_base 1508: mod_base = OTHER; note = thymine
  modified_base 1526: mod_base = OTHER; note = thymine
  modified_base 1534: mod_base = OTHER; note = thymine
  modified_base 1537..1538: mod_base = OTHER; note = thymine
  modified_base 1556: mod_base = OTHER; note = thymine
  modified_base 1609..1610: mod_base = OTHER; note = thymine
  modified_base 1618: mod_base = OTHER; note = thymine
  modified_base 1621..1622: mod_base = OTHER; note = thymine
  modified_base 1630..1631: mod_base = OTHER; note = thymine
  modified_base 1634: mod_base = OTHER; note = thymine
  modified_base 1648: mod_base = OTHER; note = thymine
  modified_base 1658: mod_base = OTHER; note = thymine
  modified_base 1661: mod_base = OTHER; note = thymine
  modified_base 1667: mod_base = OTHER; note = thymine
  modified_base 1673: mod_base = OTHER; note = thymine
  modified_base 1675: mod_base = OTHER; note = thymine
  modified_base 1696: mod_base = OTHER; note = thymine
  modified_base 1700: mod_base = OTHER; note = thymine
  modified_base 1702: mod_base = OTHER; note = thymine
  modified_base 1705: mod_base = OTHER; note = thymine
  modified_base 1718: mod_base = OTHER; note = thymine
  modified_base 1724: mod_base = OTHER; note = thymine
  modified_base 1733: mod_base = OTHER; note = thymine
  modified_base 1747: mod_base = OTHER; note = thymine
  modified_base 1751: mod_base = OTHER; note = thymine
  modified_base 1757: mod_base = OTHER; note = thymine
  modified_base 1769: mod_base = OTHER; note = thymine
  modified_base 1774..1775: mod_base = OTHER; note = thymine
  modified_base 1777: mod_base = OTHER; note = thymine
  modified_base 1786: mod_base = OTHER; note = thymine
  modified_base 1795: mod_base = OTHER; note = thymine
  modified_base 1798..1799: mod_base = OTHER; note = thymine
  modified_base 1811: mod_base = OTHER; note = thymine
  modified_base 1814: mod_base = OTHER; note = thymine
  modified_base 1817: mod_base = OTHER; note = thymine
  modified_base 1820: mod_base = OTHER; note = thymine
  modified_base 1825: mod_base = OTHER; note = thymine
  modified_base 1858: mod_base = OTHER; note = thymine
  modified_base 1864: mod_base = OTHER; note = thymine
  modified_base 1867..1868: mod_base = OTHER; note = thymine
  modified_base 1885: mod_base = OTHER; note = thymine
  modified_base 1894: mod_base = OTHER; note = thymine
  modified_base 1903..1904: mod_base = OTHER; note = thymine
  modified_base 1916: mod_base = OTHER; note = thymine
  modified_base 1924: mod_base = OTHER; note = thymine
  modified_base 1930..1931: mod_base = OTHER; note = thymine
  modified_base 1939: mod_base = OTHER; note = thymine
  modified_base 1955: mod_base = OTHER; note = thymine
  modified_base 1958: mod_base = OTHER; note = thymine
  modified_base 1961: mod_base = OTHER; note = thymine
  modified_base 1969..1970: mod_base = OTHER; note = thymine
  modified_base 1984..1985: mod_base = OTHER; note = thymine
  modified_base 2000: mod_base = OTHER; note = thymine
  modified_base 2014: mod_base = OTHER; note = thymine
  modified_base 2018: mod_base = OTHER; note = thymine
  modified_base 2026..2027: mod_base = OTHER; note = thymine
  modified_base 2030: mod_base = OTHER; note = thymine
  modified_base 2032: mod_base = OTHER; note = thymine
  modified_base 2038..2039: mod_base = OTHER; note = thymine
  modified_base 2042: mod_base = OTHER; note = thymine
  modified_base 2054: mod_base = OTHER; note = thymine
  modified_base 2060: mod_base = OTHER; note = thymine
  modified_base 2084: mod_base = OTHER; note = thymine
  modified_base 2086..2087: mod_base = OTHER; note = thymine
  modified_base 2092: mod_base = OTHER; note = thymine
  modified_base 2105: mod_base = OTHER; note = thymine
  modified_base 2114: mod_base = OTHER; note = thymine
  modified_base 2117: mod_base = OTHER; note = thymine
  modified_base 2125..2126: mod_base = OTHER; note = thymine
  modified_base 2128: mod_base = OTHER; note = thymine
  modified_base 2135: mod_base = OTHER; note = thymine
  modified_base 2144: mod_base = OTHER; note = thymine
  modified_base 2174: mod_base = OTHER; note = thymine
  modified_base 2183: mod_base = OTHER; note = thymine
  modified_base 2186: mod_base = OTHER; note = thymine
  modified_base 2189: mod_base = OTHER; note = thymine
  modified_base 2194: mod_base = OTHER; note = thymine
  modified_base 2197: mod_base = OTHER; note = thymine
  modified_base 2204: mod_base = OTHER; note = thymine
  modified_base 2210: mod_base = OTHER; note = thymine
  modified_base 2222: mod_base = OTHER; note = thymine
  modified_base 2230..2231: mod_base = OTHER; note = thymine
  modified_base 2234: mod_base = OTHER; note = thymine
  modified_base 2239: mod_base = OTHER; note = thymine
  modified_base 2249: mod_base = OTHER; note = thymine
  modified_base 2257..2258: mod_base = OTHER; note = thymine
  modified_base 2273: mod_base = OTHER; note = thymine
  modified_base 2294: mod_base = OTHER; note = thymine
  modified_base 2297: mod_base = OTHER; note = thymine
  modified_base 2314..2315: mod_base = OTHER; note = thymine
  modified_base 2326: mod_base = OTHER; note = thymine
  modified_base 2332..2333: mod_base = OTHER; note = thymine
  modified_base 2335..2336: mod_base = OTHER; note = thymine
  modified_base 2348: mod_base = OTHER; note = thymine
  modified_base 2351: mod_base = OTHER; note = thymine
  modified_base 2354: mod_base = OTHER; note = thymine
  modified_base 2360: mod_base = OTHER; note = thymine
  modified_base 2362..2363: mod_base = OTHER; note = thymine
  modified_base 2389..2390: mod_base = OTHER; note = thymine
  modified_base 2417: mod_base = OTHER; note = thymine
  modified_base 2426: mod_base = OTHER; note = thymine
  modified_base 2429: mod_base = OTHER; note = thymine
  modified_base 2441: mod_base = OTHER; note = thymine
  modified_base 2443: mod_base = OTHER; note = thymine
  modified_base 2446: mod_base = OTHER; note = thymine
  modified_base 2462: mod_base = OTHER; note = thymine
  modified_base 2470: mod_base = OTHER; note = thymine
  modified_base 2474: mod_base = OTHER; note = thymine
  modified_base 2483: mod_base = OTHER; note = thymine
  modified_base 2485..2486: mod_base = OTHER; note = thymine
  modified_base 2489: mod_base = OTHER; note = thymine
  modified_base 2491: mod_base = OTHER; note = thymine
  modified_base 2513: mod_base = OTHER; note = thymine
  modified_base 2515: mod_base = OTHER; note = thymine
  modified_base 2531: mod_base = OTHER; note = thymine
  modified_base 2540: mod_base = OTHER; note = thymine
  modified_base 2545: mod_base = OTHER; note = thymine
  modified_base 2558: mod_base = OTHER; note = thymine
  modified_base 2570: mod_base = OTHER; note = thymine
  modified_base 2572: mod_base = OTHER; note = thymine
  modified_base 2576: mod_base = OTHER; note = thymine
  modified_base 2579: mod_base = OTHER; note = thymine
  modified_base 2585: mod_base = OTHER; note = thymine
  modified_base 2591: mod_base = OTHER; note = thymine
  modified_base 2600: mod_base = OTHER; note = thymine
  modified_base 2606: mod_base = OTHER; note = thymine
  modified_base 2615: mod_base = OTHER; note = thymine
  modified_base 2624: mod_base = OTHER; note = thymine
  modified_base 2627: mod_base = OTHER; note = thymine
  modified_base 2651: mod_base = OTHER; note = thymine
  modified_base 2653: mod_base = OTHER; note = thymine
  modified_base 2663: mod_base = OTHER; note = thymine
  modified_base 2675: mod_base = OTHER; note = thymine
  modified_base 2707..2708: mod_base = OTHER; note = thymine
  modified_base 2719..2720: mod_base = OTHER; note = thymine
  modified_base 2722: mod_base = OTHER; note = thymine
  modified_base 2728: mod_base = OTHER; note = thymine
  modified_base 2759: mod_base = OTHER; note = thymine
  modified_base 2768: mod_base = OTHER; note = thymine
  modified_base 2774: mod_base = OTHER; note = thymine
  modified_base 2783: mod_base = OTHER; note = thymine
  modified_base 2798: mod_base = OTHER; note = thymine
  modified_base 2800: mod_base = OTHER; note = thymine
  modified_base 2804: mod_base = OTHER; note = thymine
  modified_base 2822: mod_base = OTHER; note = thymine
  modified_base 2840: mod_base = OTHER; note = thymine
  modified_base 2843: mod_base = OTHER; note = thymine
  modified_base 2849: mod_base = OTHER; note = thymine
  modified_base 2855: mod_base = OTHER; note = thymine
  modified_base 2857..2858: mod_base = OTHER; note = thymine
  modified_base 2875: mod_base = OTHER; note = thymine
  modified_base 2878: mod_base = OTHER; note = thymine
  modified_base 2882: mod_base = OTHER; note = thymine
  modified_base 2885: mod_base = OTHER; note = thymine
  modified_base 2891: mod_base = OTHER; note = thymine
  modified_base 2893: mod_base = OTHER; note = thymine
  modified_base 2896: mod_base = OTHER; note = thymine
  modified_base 2899: mod_base = OTHER; note = thymine
  modified_base 2906: mod_base = OTHER; note = thymine
  modified_base 2918: mod_base = OTHER; note = thymine
  modified_base 2921: mod_base = OTHER; note = thymine
  modified_base 2936: mod_base = OTHER; note = thymine
  modified_base 2939: mod_base = OTHER; note = thymine
  modified_base 2944: mod_base = OTHER; note = thymine
  modified_base 2962: mod_base = OTHER; note = thymine
  modified_base 2969: mod_base = OTHER; note = thymine
  modified_base 2972: mod_base = OTHER; note = thymine
  modified_base 2980: mod_base = OTHER; note = thymine
  modified_base 2983..2984: mod_base = OTHER; note = thymine
  modified_base 2989..2990: mod_base = OTHER; note = thymine
  modified_base 2995..2996: mod_base = OTHER; note = thymine
  modified_base 2999: mod_base = OTHER; note = thymine
  modified_base 3002: mod_base = OTHER; note = thymine
  modified_base 3004: mod_base = OTHER; note = thymine
  modified_base 3007: mod_base = OTHER; note = thymine
  modified_base 3017: mod_base = OTHER; note = thymine
  modified_base 3020: mod_base = OTHER; note = thymine
  modified_base 3026: mod_base = OTHER; note = thymine
  modified_base 3032: mod_base = OTHER; note = thymine
  modified_base 3043: mod_base = OTHER; note = thymine
  modified_base 3046..3047: mod_base = OTHER; note = thymine
  modified_base 3050: mod_base = OTHER; note = thymine
  modified_base 3055: mod_base = OTHER; note = thymine
  modified_base 3058..3059: mod_base = OTHER; note = thymine
  modified_base 3061: mod_base = OTHER; note = thymine
  modified_base 3068: mod_base = OTHER; note = thymine
  modified_base 3089: mod_base = OTHER; note = thymine
  modified_base 3091: mod_base = OTHER; note = thymine
  modified_base 3095: mod_base = OTHER; note = thymine
  modified_base 3110: mod_base = OTHER; note = thymine
  modified_base 3118: mod_base = OTHER; note = thymine
  modified_base 3137: mod_base = OTHER; note = thymine
  modified_base 3146: mod_base = OTHER; note = thymine
  modified_base 3152: mod_base = OTHER; note = thymine
  modified_base 3164: mod_base = OTHER; note = thymine
  modified_base 3166: mod_base = OTHER; note = thymine
  modified_base 3169..3170: mod_base = OTHER; note = thymine
  modified_base 3178: mod_base = OTHER; note = thymine
  modified_base 3185: mod_base = OTHER; note = thymine
  modified_base 3194: mod_base = OTHER; note = thymine
  modified_base 3206: mod_base = OTHER; note = thymine
  modified_base 3214: mod_base = OTHER; note = thymine
  modified_base 3221: mod_base = OTHER; note = thymine
  modified_base 3239: mod_base = OTHER; note = thymine
  misc_feature 1..3246: note = Synthetic
  source 1..3246: mol_type = other RNA
atggccgccttcaagcccaaccccatcaactacatcctgggcctggacatcggcatcgcctccgtgggctgggccatggtggagatcgacgaggaggagaaccccatccggctgatcgacctgggcgtgcgggtgttcgagcgggccgaggtgcccaagaccggcgactccctggccatggcccggcggctggcccggtccgtgcggcggctgacccggcggcgggcccaccggctgctgcgggcccggcggctgctgaagcgggagggcgtgctgcaggccgccgacttcgacgagaacggcctgatcaagtccctgcccaacaccccctggcagctgcgggccgccgccctggaccggaagctgacccccctggagtggtccgccgtgctgctgcacctgatcaagcaccggggctacctgtcccagcggaagaacgagggcgagaccgccgacaaggagctgggcgccctgctgaagggcgtggccgacaacgcccacgccctgcagaccggcgacttccggacccccgccgagctggccctgaacaagttcgagaaggagtgcggccacatccggaaccagcggggcgactactcccacaccttctcccggaaggacctgcaggccgagctgaacctgctgttcgagaagcagaaggagttcggcaacccccacgtgtccggcggcctgaaggagggcatcgagaccctgctgatgacccagcggcccgccctgtccggcgacgccgtgcagaagatgctgggccactgcaccttcgagcccgccgagcccaaggccgccaagaacacctacaccgccgagcggttcatctggctgaccaagctgaacaacctgcggatcctggagcagggctccgagcggcccctgaccgacaccgagcgggccaccctgatggacgagccctaccggaagtccaagctgacctacgcccaggcccggaagctgctgtccctggaggacaccgccttcttcaagggcctgcggtacggcaaggacaacgccgaggcctccaccctgatggagatgaaggcctaccacaccatctcccgggccctggagaaggagggcctgaaggacaagaagtcccccctgaacctgtcccccgagctgcaggacgagatcggcaccgccttctccctgttcaagaccgacgaggacatcaccggccggctgaaggaccggatccagcccgagatcctggaggccctgctgaagcacatctccttcgacaagttcgtgcagatctccctgaaggccctgcggcggatcgtgcccctgatggagcagggcaagcggtacgacgaggcctgcgccgagatctacggcgaccactacggcaagaagaacaccgaggagaagatctacctgccccccatccccgccgacgagatccggaaccccgtggtgctgcgggccctgtcccaggcccggaaggtgatcaacggcgtggtgcggcggtacggctcccccgcccggatccacatcgagaccgcccgggaggtgggcaagtccttcaaggaccggaaggagatcgagaagcggcaggaggagaaccggaaggaccgggagaaggccgccgccaagttccgggagtacttccccaacttcgtgggcgagcccaagtccaaggacatcctgaagctgcggctgtacgagcagcagcacggcaagtgcctgtactccggcaaggagatcaacctgggccggctgaacgagaagggctacgtggagatcgaccacgccctgcccttctcccggacctgggacgactccttcaacaacaaggtgctggtgctgggctccgagaaccagaacaagggcaaccagaccccctacgagtacttcaacggcaaggacaactcccgggagtggcaggagttcaaggcccgggtggagacctcccggttcccccggtccaagaagcagcggatcctgctgcagaagttcgacgaggacggcttcaaggagcggaacctgaacgacacccggtacgtgaaccggttcctgtgccagttcgtggccgaccggatgcggctgaccggcaagggcaagaagcgggtgttcgcctccaacggccagatcaccaacctgctgcggggcttctggggcctgcggaaggtgcgggccgagaacgaccggcaccacgccctggacgccgtggtggtggcctgctccaccgtggccatgcagcagaagatcacccggttcgtgcggtacaaggagatgaacgccttcgacggcaagaccatcgacaaggagaccggcgaggtgctgcaccagaagacccacttcccccagccctgggagttcttcgcccaggaggtgatgatccgggtgttcggcaagcccgacggcaagcccgagttcgaggaggccgacacccccgagaagctgcggaccctgctggccgagaagctgtcctcccggcccgaggccgtgcacgagtacgtgacccccctgttcgtgtcccgggcccccaaccggaagatgtccggccagggccacatggagaccgtgaagtccgccaagcggctggacgagggcgtgtccgtgctgcgggtgcccctgacccagctgaagctgaaggacctggagaagatggtgaaccgggagcgggagcccaagctgtacgaggccctgaaggcccggctggaggcccacaaggacgaccccgccaaggccttcgccgagcccttctacaagtacgacaaggccggcaaccggacccagcaggtgaaggccgtgcgggtggagcaggtgcagaagaccggcgtgtgggtgcggaaccacaacggcatcgccgacaacgccaccatggtgcgggtggacgtgttcgagaagggcgacaagtactacctggtgcccatctactcctggcaggtggccaagggcatcctgcccgaccgggccgtggtggcctacgccgacgaggaggactggaccgtgatcgacgagtccttccggttcaagttcgtgctgtactccaacgacctgatcaaggtgcagctgaagaaggactccttcctgggctacttctccggcctggaccgggccaccggcgccatctccctgcgggagcacgacctggagaagtccaagggcaaggacggcatgcaccggatcggcgtgaagaccgccctgtccttccagaagtaccagatcgacgagatgggcaaggagatccggccctgccggctgaagaagcggccccccgtgcggtga

SEQ ID NO: 282 - RNA, 3246 nt, synthetic construct
  modified_base 2: mod_base = OTHER; note = thymine
  modified_base 10..11: mod_base = OTHER; note = thymine
  modified_base 26: mod_base = OTHER; note = thymine
  modified_base 31: mod_base = OTHER; note = thymine
  modified_base 35: mod_base = OTHER; note = thymine
  modified_base 38: mod_base = OTHER; note = thymine
  modified_base 44: mod_base = OTHER; note = thymine
  modified_base 50: mod_base = OTHER; note = thymine
  modified_base 56: mod_base = OTHER; note = thymine
  modified_base 61: mod_base = OTHER; note = thymine
  modified_base 65: mod_base = OTHER; note = thymine
  modified_base 70: mod_base = OTHER; note = thymine
  modified_base 77: mod_base = OTHER; note = thymine
  modified_base 80: mod_base = OTHER; note = thymine
  modified_base 86: mod_base = OTHER; note = thymine
  modified_base 107: mod_base = OTHER; note = thymine
  modified_base 113: mod_base = OTHER; note = thymine
  modified_base 116: mod_base = OTHER; note = thymine
  modified_base 122: mod_base = OTHER; note = thymine
  modified_base 128: mod_base = OTHER; note = thymine
  modified_base 134: mod_base = OTHER; note = thymine
  modified_base 136..137: mod_base = OTHER; note = thymine
  modified_base 152: mod_base = OTHER; note = thymine
  modified_base 169: mod_base = OTHER; note = thymine
  modified_base 173: mod_base = OTHER; note = thymine
  modified_base 179: mod_base = OTHER; note = thymine
  modified_base 191: mod_base = OTHER; note = thymine
  modified_base 199: mod_base = OTHER; note = thymine
  modified_base 203: mod_base = OTHER; note = thymine
  modified_base 212: mod_base = OTHER; note = thymine
  modified_base 236: mod_base = OTHER; note = thymine
  modified_base 239: mod_base = OTHER; note = thymine
  modified_base 254: mod_base = OTHER; note = thymine
  modified_base 257: mod_base = OTHER; note = thymine
  modified_base 272: mod_base = OTHER; note = thymine
  modified_base 275: mod_base = OTHER; note = thymine
  modified_base 289..290: mod_base = OTHER; note = thymine
  modified_base 305: mod_base = OTHER; note = thymine
  modified_base 308: mod_base = OTHER; note = thymine
  modified_base 313: mod_base = OTHER; note = thymine
  modified_base 317: mod_base = OTHER; note = thymine
  modified_base 331: mod_base = OTHER; note = thymine
  modified_base 338: mod_base = OTHER; note = thymine
  modified_base 353: mod_base = OTHER; note = thymine
  modified_base 365: mod_base = OTHER; note = thymine
  modified_base 374: mod_base = OTHER; note = thymine
  modified_base 379: mod_base = OTHER; note = thymine
  modified_base 382: mod_base = OTHER; note = thymine
  modified_base 389: mod_base = OTHER; note = thymine
  modified_base 392: mod_base = OTHER; note = thymine
  modified_base 395: mod_base = OTHER; note = thymine
  modified_base 401: mod_base = OTHER; note = thymine
  modified_base 404: mod_base = OTHER; note = thymine
  modified_base 418: mod_base = OTHER; note = thymine
  modified_base 422: mod_base = OTHER; note = thymine
  modified_base 424: mod_base = OTHER; note = thymine
  modified_base 464: mod_base = OTHER; note = thymine
  modified_base 473: mod_base = OTHER; note = thymine
  modified_base 476: mod_base = OTHER; note = thymine
  modified_base 485: mod_base = OTHER; note = thymine
  modified_base 506: mod_base = OTHER; note = thymine
  modified_base 520..521: mod_base = OTHER; note = thymine
  modified_base 539: mod_base = OTHER; note = thymine
  modified_base 545: mod_base = OTHER; note = thymine
  modified_base 553..554: mod_base = OTHER; note = thymine
  modified_base 565: mod_base = OTHER; note = thymine
  modified_base 575: mod_base = OTHER; note = thymine
  modified_base 595: mod_base = OTHER; note = thymine
  modified_base 598: mod_base = OTHER; note = thymine
  modified_base 607..608: mod_base = OTHER; note = thymine
  modified_base 610: mod_base = OTHER; note = thymine
  modified_base 623: mod_base = OTHER; note = thymine
  modified_base 635: mod_base = OTHER; note = thymine
  modified_base 641: mod_base = OTHER; note = thymine
  modified_base 644: mod_base = OTHER; note = thymine
  modified_base 646..647: mod_base = OTHER; note = thymine
  modified_base 664..665: mod_base = OTHER; note = thymine
  modified_base 680: mod_base = OTHER; note = thymine
  modified_base 682: mod_base = OTHER; note = thymine
  modified_base 692: mod_base = OTHER; note = thymine
  modified_base 704: mod_base = OTHER; note = thymine
  modified_base 713: mod_base = OTHER; note = thymine
  modified_base 716: mod_base = OTHER; note = thymine
  modified_base 719: mod_base = OTHER; note = thymine
  modified_base 737: mod_base = OTHER; note = thymine
  modified_base 739: mod_base = OTHER; note = thymine
  modified_base 752: mod_base = OTHER; note = thymine
  modified_base 761: mod_base = OTHER; note = thymine
  modified_base 764: mod_base = OTHER; note = thymine
  modified_base 772: mod_base = OTHER; note = thymine
  modified_base 778..779: mod_base = OTHER; note = thymine
  modified_base 814: mod_base = OTHER; note = thymine
  modified_base 829..830: mod_base = OTHER; note = thymine
  modified_base 833: mod_base = OTHER; note = thymine
  modified_base 835: mod_base = OTHER; note = thymine
  modified_base 839: mod_base = OTHER; note = thymine
  modified_base 848: mod_base = OTHER; note = thymine
  modified_base 857: mod_base = OTHER; note = thymine
  modified_base 863: mod_base = OTHER; note = thymine
  modified_base 866: mod_base = OTHER; note = thymine
  modified_base 877: mod_base = OTHER; note = thymine
  modified_base 890: mod_base = OTHER; note = thymine
  modified_base 914: mod_base = OTHER; note = thymine
  modified_base 917: mod_base = OTHER; note = thymine
  modified_base 928: mod_base = OTHER; note = thymine
  modified_base 937: mod_base = OTHER; note = thymine
  modified_base 944: mod_base = OTHER; note = thymine
  modified_base 949: mod_base = OTHER; note = thymine
  modified_base 968: mod_base = OTHER; note = thymine
  modified_base 971: mod_base = OTHER; note = thymine
  modified_base 973: mod_base = OTHER; note = thymine
  modified_base 977: mod_base = OTHER; note = thymine
  modified_base 991..992: mod_base = OTHER; note = thymine
  modified_base 994..995: mod_base = OTHER; note = thymine
  modified_base 1004: mod_base = OTHER; note = thymine
  modified_base 1009: mod_base = OTHER; note = thymine
  modified_base 1033: mod_base = OTHER; note = thymine
  modified_base 1040: mod_base = OTHER; note = thymine
  modified_base 1043: mod_base = OTHER; note = thymine
  modified_base 1049: mod_base = OTHER; note = thymine
  modified_base 1057: mod_base = OTHER; note = thymine
  modified_base 1067: mod_base = OTHER; note = thymine
  modified_base 1069: mod_base = OTHER; note = thymine
  modified_base 1079: mod_base = OTHER; note = thymine
  modified_base 1094: mod_base = OTHER; note = thymine
  modified_base 1108: mod_base = OTHER; note = thymine
  modified_base 1115: mod_base = OTHER; note = thymine
  modified_base 1121: mod_base = OTHER; note = thymine
  modified_base 1123: mod_base = OTHER; note = thymine
  modified_base 1133: mod_base = OTHER; note = thymine
  modified_base 1145: mod_base = OTHER; note = thymine
  modified_base 1156..1157: mod_base = OTHER; note = thymine
  modified_base 1159: mod_base = OTHER; note = thymine
  modified_base 1163: mod_base = OTHER; note = thymine
  modified_base 1165..1166: mod_base = OTHER; note = thymine
  modified_base 1184: mod_base = OTHER; note = thymine
  modified_base 1196: mod_base = OTHER; note = thymine
  modified_base 1208: mod_base = OTHER; note = thymine
  modified_base 1220: mod_base = OTHER; note = thymine
  modified_base 1223: mod_base = OTHER; note = thymine
  modified_base 1232: mod_base = OTHER; note = thymine
  modified_base 1235: mod_base = OTHER; note = thymine
  modified_base 1244: mod_base = OTHER; note = thymine
  modified_base 1246: mod_base = OTHER; note = thymine
  modified_base 1249..1250: mod_base = OTHER; note = thymine
  modified_base 1258..1259: mod_base = OTHER; note = thymine
  modified_base 1262: mod_base = OTHER; note = thymine
  modified_base 1268: mod_base = OTHER; note = thymine
  modified_base 1270: mod_base = OTHER; note = thymine
  modified_base 1274: mod_base = OTHER; note = thymine
  modified_base 1283: mod_base = OTHER; note = thymine
  modified_base 1292: mod_base = OTHER; note = thymine
  modified_base 1295: mod_base = OTHER; note = thymine
  modified_base 1301: mod_base = OTHER; note = thymine
  modified_base 1304: mod_base = OTHER; note = thymine
  modified_base 1321: mod_base = OTHER; note = thymine
  modified_base 1333: mod_base = OTHER; note = thymine
  modified_base 1343: mod_base = OTHER; note = thymine
  modified_base 1345: mod_base = OTHER; note = thymine
  modified_base 1357: mod_base = OTHER; note = thymine
  modified_base 1385: mod_base = OTHER; note = thymine
  modified_base 1387: mod_base = OTHER; note = thymine
  modified_base 1391: mod_base = OTHER; note = thymine
  modified_base 1400: mod_base = OTHER; note = thymine
  modified_base 1415: mod_base = OTHER; note = thymine
  modified_base 1427: mod_base = OTHER; note = thymine
  modified_base 1430: mod_base = OTHER; note = thymine
  modified_base 1433: mod_base = OTHER; note = thymine
  modified_base 1442: mod_base = OTHER; note = thymine
  modified_base 1444: mod_base = OTHER; note = thymine
  modified_base 1460: mod_base = OTHER; note = thymine
  modified_base 1463: mod_base = OTHER; note = thymine
  modified_base 1472: mod_base = OTHER; note = thymine
  modified_base 1475: mod_base = OTHER; note = thymine
  modified_base 1483: mod_base = OTHER; note = thymine
  modified_base 1489: mod_base = OTHER; note = thymine
  modified_base 1502: mod_base = OTHER; note = thymine
  modified_base 1508: mod_base = OTHER; note = thymine
  modified_base 1526: mod_base = OTHER; note = thymine
  modified_base 1534: mod_base = OTHER; note = thymine
  modified_base 1537..1538: mod_base = OTHER; note = thymine
  modified_base 1556: mod_base = OTHER; note = thymine
  modified_base 1609..1610: mod_base = OTHER; note = thymine
  modified_base 1618: mod_base = OTHER; note = thymine
  modified_base 1621..1622: mod_base = OTHER; note = thymine
  modified_base 1630..1631: mod_base = OTHER; note = thymine
  modified_base 1634: mod_base = OTHER; note = thymine
  modified_base 1648: mod_base = OTHER; note = thymine
  modified_base 1658: mod_base = OTHER; note = thymine
  modified_base 1661: mod_base = OTHER; note = thymine
  modified_base 1667: mod_base = OTHER; note = thymine
  modified_base 1673: mod_base = OTHER; note = thymine
  modified_base 1675: mod_base = OTHER; note = thymine
  modified_base 1696: mod_base = OTHER; note = thymine
  modified_base 1700: mod_base = OTHER; note = thymine
  modified_base 1702: mod_base = OTHER; note = thymine
  modified_base 1705: mod_base = OTHER; note = thymine
  modified_base 1718: mod_base = OTHER; note = thymine
  modified_base 1724: mod_base = OTHER; note = thymine
  modified_base 1733: mod_base = OTHER; note = thymine
  modified_base 1747: mod_base = OTHER; note = thymine
  modified_base 1751: mod_base = OTHER; note = thymine
  modified_base 1757: mod_base = OTHER; note = thymine
  modified_base 1769: mod_base = OTHER; note = thymine
  modified_base 1774..1775: mod_base = OTHER; note = thymine
  modified_base 1777: mod_base = OTHER; note = thymine
  modified_base 1786: mod_base = OTHER; note = thymine
  modified_base 1795: mod_base = OTHER; note = thymine
  modified_base 1798..1799: mod_base = OTHER; note = thymine
  modified_base 1811: mod_base = OTHER; note = thymine
  modified_base 1814: mod_base = OTHER; note = thymine
  modified_base 1817: mod_base = OTHER; note = thymine
  modified_base 1820: mod_base = OTHER; note = thymine
  modified_base 1825: mod_base = OTHER; note = thymine
  modified_base 1858: mod_base = OTHER; note = thymine
  modified_base 1864: mod_base = OTHER; note = thymine
  modified_base 1867..1868: mod_base = OTHER; note = thymine
  modified_base 1885: mod_base = OTHER; note = thymine
  modified_base 1894: mod_base = OTHER; note = thymine
  modified_base 1903..1904: mod_base = OTHER; note = thymine
  modified_base 1916: mod_base = OTHER; note = thymine
  modified_base 1924: mod_base = OTHER; note = thymine
  modified_base 1930..1931: mod_base = OTHER; note = thymine
  modified_base 1939: mod_base = OTHER; note = thymine
  modified_base 1955: mod_base = OTHER; note = thymine
  modified_base 1958: mod_base = OTHER; note = thymine
  modified_base 1961: mod_base = OTHER; note = thymine
  modified_base 1969..1970: mod_base = OTHER; note = thymine
  modified_base 1984..1985: mod_base = OTHER; note = thymine
  modified_base 2000: mod_base = OTHER; note = thymine
  modified_base 2014: mod_base = OTHER; note = thymine
  modified_base 2018: mod_base = OTHER; note = thymine
  modified_base 2026..2027: mod_base = OTHER; note = thymine
  modified_base 2030: mod_base = OTHER; note = thymine
  modified_base 2032: mod_base = OTHER; note = thymine
  modified_base 2038..2039: mod_base = OTHER; note = thymine
  modified_base 2042: mod_base = OTHER; note = thymine
  modified_base 2054: mod_base = OTHER; note = thymine
  modified_base 2060: mod_base = OTHER; note = thymine
  modified_base 2084: mod_base = OTHER; note = thymine
  modified_base 2086..2087: mod_base = OTHER; note = thymine
  modified_base 2092: mod_base = OTHER; note = thymine
  modified_base 2105: mod_base = OTHER; note = thymine
  modified_base 2114: mod_base = OTHER; note = thymine
  modified_base 2117: mod_base = OTHER; note = thymine
  modified_base 2125..2126: mod_base = OTHER; note = thymine
  modified_base 2128: mod_base = OTHER; note = thymine
  modified_base 2135: mod_base = OTHER; note = thymine
  modified_base 2144: mod_base = OTHER; note = thymine
  modified_base 2174: mod_base = OTHER; note = thymine
  modified_base 2183: mod_base = OTHER; note = thymine
  modified_base 2186: mod_base = OTHER; note = thymine
  modified_base 2189: mod_base = OTHER; note = thymine
  modified_base 2194: mod_base = OTHER; note = thymine
  modified_base 2197: mod_base = OTHER; note = thymine
  modified_base 2204: mod_base = OTHER; note = thymine
  modified_base 2210: mod_base = OTHER; note = thymine
  modified_base 2222: mod_base = OTHER; note = thymine
  modified_base 2230..2231: mod_base = OTHER; note = thymine
  modified_base 2234: mod_base = OTHER; note = thymine
  modified_base 2239: mod_base = OTHER; note = thymine
  modified_base 2249: mod_base = OTHER; note = thymine
  modified_base 2257..2258: mod_base = OTHER; note = thymine
  modified_base 2273: mod_base = OTHER; note = thymine
  modified_base 2294: mod_base = OTHER; note = thymine
  modified_base 2297: mod_base = OTHER; note = thymine
  modified_base 2314..2315: mod_base = OTHER; note = thymine
  modified_base 2326: mod_base = OTHER; note = thymine
  modified_base 2332..2333: mod_base = OTHER; note = thymine
  modified_base 2335..2336: mod_base = OTHER; note = thymine
  modified_base 2348: mod_base = OTHER; note = thymine
  modified_base 2351: mod_base = OTHER; note = thymine
  modified_base 2354: mod_base = OTHER; note = thymine
  modified_base 2360: mod_base = OTHER; note = thymine
  modified_base 2362..2363: mod_base = OTHER; note = thymine
  modified_base 2389..2390: mod_base = OTHER; note = thymine
  modified_base 2417: mod_base = OTHER; note = thymine
  modified_base 2426: mod_base = OTHER; note = thymine
  modified_base 2429: mod_base = OTHER; note = thymine
  modified_base 2441: mod_base = OTHER; note = thymine
  modified_base 2443: mod_base = OTHER; note = thymine
  modified_base 2446: mod_base = OTHER; note = thymine
  modified_base 2462: mod_base = OTHER; note = thymine
  modified_base 2470: mod_base = OTHER; note = thymine
  modified_base 2474: mod_base = OTHER; note = thymine
  modified_base 2483: mod_base = OTHER; note = thymine
  modified_base 2485..2486: mod_base = OTHER; note = thymine
  modified_base 2489: mod_base = OTHER; note = thymine
  modified_base 2491: mod_base = OTHER; note = thymine
  modified_base 2513: mod_base = OTHER; note = thymine
  modified_base 2515: mod_base = OTHER; note = thymine
  modified_base 2531: mod_base = OTHER; note = thymine
  modified_base 2540: mod_base = OTHER; note = thymine
  modified_base 2545: mod_base = OTHER; note = thymine
  modified_base 2558: mod_base = OTHER; note = thymine
  modified_base 2570: mod_base = OTHER; note = thymine
  modified_base 2572: mod_base = OTHER; note = thymine
  modified_base 2576: mod_base = OTHER; note = thymine
  modified_base 2579: mod_base = OTHER; note = thymine
  modified_base 2585: mod_base = OTHER; note = thymine
  modified_base 2591: mod_base = OTHER; note = thymine
  modified_base 2600: mod_base = OTHER; note = thymine
  modified_base 2606: mod_base = OTHER; note = thymine
  modified_base 2615: mod_base = OTHER; note = thymine
  modified_base 2624: mod_base = OTHER; note = thymine
  modified_base 2627: mod_base = OTHER; note = thymine
  modified_base 2651: mod_base = OTHER; note = thymine
  modified_base 2653: mod_base = OTHER; note = thymine
  modified_base 2663: mod_base = OTHER; note = thymine
  modified_base 2675: mod_base = OTHER; note = thymine
  modified_base 2707..2708: mod_base = OTHER; note = thymine
  modified_base 2719..2720: mod_base = OTHER; note = thymine
  modified_base 2722: mod_base = OTHER; note = thymine
  modified_base 2728: mod_base = OTHER; note = thymine
  modified_base 2759: mod_base = OTHER; note = thymine
  modified_base 2768: mod_base = OTHER; note = thymine
  modified_base 2774: mod_base = OTHER; note = thymine
  modified_base 2783: mod_base = OTHER; note = thymine
  modified_base 2798: mod_base = OTHER; note = thymine
  modified_base 2800: mod_base = OTHER; note = thymine
  modified_base 2804: mod_base = OTHER; note = thymine
  modified_base 2822: mod_base = OTHER; note = thymine
  modified_base 2840: mod_base = OTHER; note = thymine
  modified_base 2843: mod_base = OTHER; note = thymine
  modified_base 2849: mod_base = OTHER; note = thymine
  modified_base 2855: mod_base = OTHER; note = thymine
  modified_base 2857..2858: mod_base = OTHER; note = thymine
  modified_base 2875: mod_base = OTHER; note = thymine
  modified_base 2878: mod_base = OTHER; note = thymine
  modified_base 2882: mod_base = OTHER; note = thymine
  modified_base 2885: mod_base = OTHER; note = thymine
  modified_base 2891: mod_base = OTHER; note = thymine
  modified_base 2893: mod_base = OTHER; note = thymine
  modified_base 2896: mod_base = OTHER; note = thymine
  modified_base 2899: mod_base = OTHER; note = thymine
  modified_base 2906: mod_base = OTHER; note = thymine
  modified_base 2918: mod_base = OTHER; note = thymine
  modified_base 2921: mod_base = OTHER; note = thymine
  modified_base 2936: mod_base = OTHER; note = thymine
  modified_base 2939: mod_base = OTHER; note = thymine
  modified_base 2944: mod_base = OTHER; note = thymine
  modified_base 2962: mod_base = OTHER; note = thymine
  modified_base 2969: mod_base = OTHER; note = thymine
  modified_base 2972: mod_base = OTHER; note = thymine
  modified_base 2980: mod_base = OTHER; note = thymine
  modified_base 2983..2984: mod_base = OTHER; note = thymine
  modified_base 2989..2990: mod_base = OTHER; note = thymine
  modified_base 2995..2996: mod_base = OTHER; note = thymine
  modified_base 2999: mod_base = OTHER; note = thymine
  modified_base 3002: mod_base = OTHER; note = thymine
  modified_base 3004: mod_base = OTHER; note = thymine
  modified_base 3007: mod_base = OTHER; note = thymine
  modified_base 3017: mod_base = OTHER; note = thymine
  modified_base 3020: mod_base = OTHER; note = thymine
  modified_base 3026: mod_base = OTHER; note = thymine
  modified_base 3032: mod_base = OTHER; note = thymine
  modified_base 3043: mod_base = OTHER; note = thymine
  modified_base 3046..3047: mod_base = OTHER; note = thymine
  modified_base 3050: mod_base = OTHER; note = thymine
  modified_base 3055: mod_base = OTHER; note = thymine
  modified_base 3058..3059: mod_base = OTHER; note = thymine
  modified_base 3061: mod_base = OTHER; note = thymine
  modified_base 3068: mod_base = OTHER; note = thymine
  modified_base 3089: mod_base = OTHER; note = thymine
  modified_base 3091: mod_base = OTHER; note = thymine
  modified_base 3095: mod_base = OTHER; note = thymine
  modified_base 3110: mod_base = OTHER; note = thymine
  modified_base 3118: mod_base = OTHER; note = thymine
  modified_base 3137: mod_base = OTHER; note = thymine
  modified_base 3146: mod_base = OTHER; note = thymine
  modified_base 3152: mod_base = OTHER; note = thymine
  modified_base 3164: mod_base = OTHER; note = thymine
  modified_base 3166: mod_base = OTHER; note = thymine
  modified_base 3169..3170: mod_base = OTHER; note = thymine
  modified_base 3178: mod_base = OTHER; note = thymine
  modified_base 3185: mod_base = OTHER; note = thymine
  modified_base 3194: mod_base = OTHER; note = thymine
  modified_base 3206: mod_base = OTHER; note = thymine
  modified_base 3214: mod_base = OTHER; note = thymine
  modified_base 3221: mod_base = OTHER; note = thymine
  modified_base 3239: mod_base = OTHER; note = thymine
  misc_feature 1..3246: note = Synthetic
  source 1..3246: mol_type = other RNA
atggcagcattcaaaccaaacccaatcaactacatcctaggactagacatcggaatcgcatcagtaggatgagcaatggtagaaatcgacgaagaagaaaacccaatccgactaatcgacctaggagtacgagtattcgaacgagcagaagtaccaaaaacaggagactcactagcaatggcacgacgactagcacgatcagtacgacgactaacacgacgacgagcacaccgactactacgagcacgacgactactaaaacgagaaggagtactacaagcagcagacttcgacgaaaacggactaatcaaatcactaccaaacacaccatgacaactacgagcagcagcactagaccgaaaactaacaccactagaatgatcagcagtactactacacctaatcaaacaccgaggatacctatcacaacgaaaaaacgaaggagaaacagcagacaaagaactaggagcactactaaaaggagtagcagacaacgcacacgcactacaaacaggagacttccgaacaccagcagaactagcactaaacaaattcgaaaaagaatgcggacacatccgaaaccaacgaggagactactcacacacattctcacgaaaagacctacaagcagaactaaacctactattcgaaaaacaaaaagaattcggaaacccacacgtatcaggaggactaaaagaaggaatcgaaacactactaatgacacaacgaccagcactatcaggagacgcagtacaaaaaatgctaggacactgcacattcgaaccagcagaaccaaaagcagcaaaaaacacatacacagcagaacgattcatctgactaacaaaactaaacaacctacgaatcctagaacaaggatcagaacgaccactaacagacacagaacgagcaacactaatggacgaaccataccgaaaatcaaaactaacatacgcacaagcacgaaaactactatcactagaagacacagcattcttcaaaggactacgatacggaaaagacaacgcagaagcatcaacactaatggaaatgaaagcataccacacaatctcacgagcactagaaaaagaaggactaaaagacaaaaaatcaccactaaacctatcaccagaactacaagacgaaatcggaacagcattctcactattcaaaacagacgaagacatcacaggacgactaaaagaccgaatccaaccagaaatcctagaagcactactaaaacacatctcattcgacaaattcgtacaaatctcactaaaagcactacgacgaatcgtaccactaatggaacaaggaaaacgatacgacgaagcatgcgcagaaatctacggagaccactacggaaaaaaaaacacagaagaaaaaatctacctaccaccaatcccagcagacgaaatccgaaacccagtagtactacgagcactatcacaagcacgaaaagtaatcaacggagtagtacgacgatacggatcaccagcacgaatccacatcgaaacagcacgagaagtaggaaaatcattcaaagaccgaaaagaaatcgaaaaacgacaagaagaaaaccgaaaagaccgagaaaaagcagcagcaaaattccgagaatacttcccaaacttcgtaggagaaccaaaatcaaaagacatcctaaaactacgactatacgaacaacaacacggaaaatgcctatactcaggaaaagaaatcaacctaggacgactaaacgaaaaaggatacgtagaaatcgaccacgcactaccattctcacgaacatgagacgactcattcaacaacaaagtactagtactaggatcagaaaaccaaaacaaaggaaaccaaacaccatacgaatacttcaacggaaaagacaactcacgagaatgacaagaattcaaagcacgagtagaaacatcacgattcccacgatcaaaaaaacaacgaatcctactacaaaaattcgacgaagacggattcaaagaacgaaacctaaacgacacacgatacgtaaaccgattcctatgccaattcgtagcagaccgaatgcgactaacaggaaaaggaaaaaaacgagtattcgcatcaaacggacaaatcacaaacctactacgaggattctgaggactacgaaaagtacgagcagaaaacgaccgacaccacgcactagacgcagtagtagtagcatgctcaacagtagcaatgcaacaaaaaatcacacgattcgtacgatacaaagaaatgaacgcattcgacggaaaaacaatcgacaaagaaacaggagaagtactacaccaaaaaacacacttcccacaaccatgagaattcttcgcacaagaagtaatgatccgagtattcggaaaaccagacggaaaaccagaattcgaagaagcagacacaccagaaaaactacgaacactactagcagaaaaactatcatcacgaccagaagcagtacacgaatacgtaacaccactattcgtatcacgagcaccaaaccgaaaaatgtcaggacaaggacacatggaaacagtaaaatcagcaaaacgactagacgaaggagtatcagtactacgagtaccactaacacaactaaaactaaaagacctagaaaaaatggtaaaccgagaacgagaaccaaaactatacgaagcactaaaagcacgactagaagcacacaaagacgacccagcaaaagcattcgcagaaccattctacaaatacgacaaagcaggaaaccgaacacaacaagtaaaagcagtacgagtagaacaagtacaaaaaacaggagtatgagtacgaaaccacaacggaatcgcagacaacgcaacaatggtacgagtagacgtattcgaaaaaggagacaaatactacctagtaccaatctactcatgacaagtagcaaaaggaatcctaccagaccgagcagtagtagcatacgcagacgaagaagactgaacagtaatcgacgaatcattccgattcaaattcgtactatactcaaacgacctaatcaaagtacaactaaaaaaagactcattcctaggatacttctcaggactagaccgagcaacaggagcaatctcactacgagaacacgacctagaaaaatcaaaaggaaaagacggaatgcaccgaatcggagtaaaaacagcactatcattccaaaaataccaaatcgacgaaatgggaaaagaaatccgaccatgccgactaaaaaaacgaccaccagtacgataa

SEQ ID NO: 283 - protein, 1081 aa, synthetic construct
  REGION 1..1081: note = Synthetic
MAAFKPNPINYILGLAIGIASVGWAMVEIDEEENPIRLIDLGVRVFERAEVPKTGDSLAMARRLARSVRRLTRRRAHRLLRARRLLKREGVLQAADFDENGLIKSLPNTPWQLRAAALDRKLTPLEWSAVLLHLIKHRGYLSQRKNEGETADKELGALLKGVADNAHALQTGDFRTPAELALNKFEKECGHIRNQRGDYSHTFSRKDLQAELNLLFEKQKEFGNPHVSGGLKEGIETLLMTQRPALSGDAVQKMLGHCTFEPAEPKAAKNTYTAERFIWLTKLNNLRILEQGSERPLTDTERATLMDEPYRKSKLTYAQARKLLSLEDTAFFKGLRYGKDNAEASTLMEMKAYHTISRALEKEGLKDKKSPLNLSPELQDEIGTAFSLFKTDEDITGRLKDRIQPEILEALLKHISFDKFVQISLKALRRIVPLMEQGKRYDEACAEIYGDHYGKKNTEEKIYLPPIPADEIRNPVVLRALSQARKVINGVVRRYGSPARIHIETAREVGKSFKDRKEIEKRQEENRKDREKAAAKFREYFPNFVGEPKSKDILKLRLYEQQHGKCLYSGKEINLGRLNEKGYVEIDAALPFSRTWDDSFNNKVLVLGSENQNKGNQTPYEYFNGKDNSREWQEFKARVETSRFPRSKKQRILLQKFDEDGFKERNLNDTRYVNRFLCQFVADRMRLTGKGKKRVFASNGQITNLLRGFWGLRKVRAENDRHHALDAVVVACSTVAMQQKITRFVRYKEMNAFDGKTIDKETGEVLHQKTHFPQPWEFFAQEVMIRVFGKPDGKPEFEEADTPEKLRTLLAEKLSSRPEAVHEYVTPLFVSRAPNRKMSGQGHMETVKSAKRLDEGVSVLRVPLTQLKLKDLEKMVNREREPKLYEALKARLEAHKDDPAKAFAEPFYKYDKAGNRTQQVKAVRVEQVQKTGVWVRNHNGIADNATMVRVDVFEKGDKYYLVPIYSWQVAKGILPDRAVVAYADEEDWTVIDESFRFKFVLYSNDLIKVQLKKDSFLGYFSGLDRATGAISLREHDLEKSKGKDGMHRIGVKTALSFQKYQIDEMGKEIRPCRLKKRPPVR

SEQ ID NO: 284 - DNA, 3240 bp, synthetic construct
  misc_feature 1..3240: note = Synthetic
  source 1..3240: mol_type = other DNA
gctgcttttaagcctaatcctattaattatattcttggtcttgctattggtattgcttctgttggttgggctatggttgagattgatgaggaggagaatcctattcgtcttattgatcttggtgttcgtgtttttgagcgtgctgaggttcctaagactggtgattctcttgctatggctcgtcgtcttgctcgttctgttcgtcgtcttactcgtcgtcgtgctcatcgtcttcttcgtgctcgtcgtcttcttaagcgtgagggtgttcttcaggctgctgattttgatgagaatggtcttattaagtctcttcctaatactccttggcagcttcgtgctgctgctcttgatcgtaagcttactcctcttgagtggtctgctgttcttcttcatcttattaagcatcgtggttatctttctcagcgtaagaatgagggtgagactgctgataaggagcttggtgctcttcttaagggtgttgctgataatgctcatgctcttcagactggtgattttcgtactcctgctgagcttgctcttaataagtttgagaaggagtgtggtcatattcgtaatcagcgtggtgattattctcatactttttctcgtaaggatcttcaggctgagcttaatcttctttttgagaagcagaaggagtttggtaatcctcatgtttctggtggtcttaaggagggtattgagactcttcttatgactcagcgtcctgctctttctggtgatgctgttcagaagatgcttggtcattgtacttttgagcctgctgagcctaaggctgctaagaatacttatactgctgagcgttttatttggcttactaagcttaataatcttcgtattcttgagcagggttctgagcgtcctcttactgatactgagcgtgctactcttatggatgagccttatcgtaagtctaagcttacttatgctcaggctcgtaagcttctttctcttgaggatactgctttttttaagggtcttcgttatggtaaggataatgctgaggcttctactcttatggagatgaaggcttatcatactatttctcgtgctcttgagaaggagggtcttaaggataagaagtctcctcttaatctttctcctgagcttcaggatgagattggtactgctttttctctttttaagactgatgaggatattactggtcgtcttaaggatcgtattcagcctgagattcttgaggctcttcttaagcatatttcttttgataagtttgttcagatttctcttaaggctcttcgtcgtattgttcctcttatggagcagggtaagcgttatgatgaggcttgtgctgagatttatggtgatcattatggtaagaagaatactgaggagaagatttatcttcctcctattcctgctgatgagattcgtaatcctgttgttcttcgtgctctttctcaggctcgtaaggttattaatggtgttgttcgtcgttatggttctcctgctcgtattcatattgagactgctcgtgaggttggtaagtcttttaaggatcgtaaggagattgagaagcgtcaggaggagaatcgtaaggatcgtgagaaggctgctgctaagtttcgtgagtattttcctaattttgttggtgagcctaagtctaaggatattcttaagcttcgtctttatgagcagcagcatggtaagtgtctttattctggtaaggagattaatcttggtcgtcttaatgagaagggttatgttgagattgatgctgctcttcctttttctcgtacttgggatgattcttttaataataaggttcttgttcttggttctgagaatcagaataagggtaatcagactccttatgagtattttaatggtaaggataattctcgtgagtggcaggagtttaaggctcgtgttgagacttctcgttttcctcgttctaagaagcagcgtattcttcttcagaagtttgatgaggatggttttaaggagcgtaatcttaatgatactcgttatgttaatcgttttctttgtcagtttgttgctgatcgtatgcgtcttactggtaagggtaagaagcgtgtttttgcttctaatggtcagattactaatcttcttcgtggtttttggggtcttcgtaaggttcgtgctgagaatgatcgtcatcatgctcttgatgctgttgttgttgcttgttctactgttgctatgcagcagaagattactcgttttgttcgttataaggagatgaatgcttttgatggtaagactattgataaggagactggtgaggttcttcatcagaagactcattttcctcagccttgggagttttttgctcaggaggttatgattcgtgtttttggtaagcctgatggtaagcctgagtttgaggaggctgatactcctgagaagcttcgtactcttcttgctgagaagctttcttctcgtcctgaggctgttcatgagtatgttactcctctttttgtttctcgtgctcctaatcgtaagatgtctggtcagggtcatatggagactgttaagtctgctaagcgtcttgatgagggtgtttctgttcttcgtgttcctcttactcagcttaagcttaaggatcttgagaagatggttaatcgtgagcgtgagcctaagctttatgaggctcttaaggctcgtcttgaggctcataaggatgatcctgctaaggcttttgctgagcctttttataagtatgataaggctggtaatcgtactcagcaggttaaggctgttcgtgttgagcaggttcagaagactggtgtttgggttcgtaatcataatggtattgctgataatgctactatggttcgtgttgatgtttttgagaagggtgataagtattatcttgttcctatttattcttggcaggttgctaagggtattcttcctgatcgtgctgttgttgcttatgctgatgaggaggattggactgttattgatgagtcttttcgttttaagtttgttctttattctaatgatcttattaaggttcagcttaagaaggattcttttcttggttatttttctggtcttgatcgtgctactggtgctatttctcttcgtgagcatgatcttgagaagtctaagggtaaggatggtatgcatcgtattggtgttaagactgctctttcttttcagaagtatcagattgatgagatgggtaaggagattcgtccttgtcgtcttaagaagcgtcctcctgttcgt

SEQ ID NO: 285 - DNA, 3240 bp, synthetic construct
  misc_feature 1..3240: note = Synthetic
  source 1..3240: mol_type = other DNA
gccgccttcaagcccaaccccatcaactacatcctgggcctggccatcggcatcgcctccgtgggctgggccatggtggagatcgacgaggaggagaaccccatccggctgatcgacctgggcgtgcgggtgttcgagcgggccgaggtgcccaagaccggcgactccctggccatggcccggcggctggcccggtccgtgcggcggctgacccggcggcgggcccaccggctgctgcgggcccggcggctgctgaagcgggagggcgtgctgcaggccgccgacttcgacgagaacggcctgatcaagtccctgcccaacaccccctggcagctgcgggccgccgccctggaccggaagctgacccccctggagtggtccgccgtgctgctgcacctgatcaagcaccggggctacctgtcccagcggaagaacgagggcgagaccgccgacaaggagctgggcgccctgctgaagggcgtggccgacaacgcccacgccctgcagaccggcgacttccggacccccgccgagctggccctgaacaagttcgagaaggagtgcggccacatccggaaccagcggggcgactactcccacaccttctcccggaaggacctgcaggccgagctgaacctgctgttcgagaagcagaaggagttcggcaacccccacgtgtccggcggcctgaaggagggcatcgagaccctgctgatgacccagcggcccgccctgtccggcgacgccgtgcagaagatgctgggccactgcaccttcgagcccgccgagcccaaggccgccaagaacacctacaccgccgagcggttcatctggctgaccaagctgaacaacctgcggatcctggagcagggctccgagcggcccctgaccgacaccgagcgggccaccctgatggacgagccctaccggaagtccaagctgacctacgcccaggcccggaagctgctgtccctggaggacaccgccttcttcaagggcctgcggtacggcaaggacaacgccgaggcctccaccctgatggagatgaaggcctaccacaccatctcccgggccctggagaaggagggcctgaaggacaagaagtcccccctgaacctgtcccccgagctgcaggacgagatcggcaccgccttctccctgttcaagaccgacgaggacatcaccggccggctgaaggaccggatccagcccgagatcctggaggccctgctgaagcacatctccttcgacaagttcgtgcagatctccctgaaggccctgcggcggatcgtgcccctgatggagcagggcaagcggtacgacgaggcctgcgccgagatctacggcgaccactacggcaagaagaacaccgaggagaagatctacctgccccccatccccgccgacgagatccggaaccccgtggtgctgcgggccctgtcccaggcccggaaggtgatcaacggcgtggtgcggcggtacggctcccccgcccggatccacatcgagaccgcccgggaggtgggcaagtccttcaaggaccggaaggagatcgagaagcggcaggaggagaaccggaaggaccgggagaaggccgccgccaagttccgggagtacttccccaacttcgtgggcgagcccaagtccaaggacatcctgaagctgcggctgtacgagcagcagcacggcaagtgcctgtactccggcaaggagatcaacctgggccggctgaacgagaagggctacgtggagatcgacgccgccctgcccttctcccggacctgggacgactccttcaacaacaaggtgctggtgctgggctccgagaaccagaacaagggcaaccagaccccctacgagtacttcaacggcaaggacaactcccgggagtggcaggagttcaaggcccgggtggagacctcccggttcccccggtccaagaagcagcggatcctgctgcagaagttcgacgaggacggcttcaaggagcggaacctgaacgacacccggtacgtgaaccggttcctgtgccagttcgtggccgaccggatgcggctgaccggcaagggcaagaagcgggtgttcgcctccaacggccagatcaccaacctgctgcggggcttctggggcctgcggaaggtgcgggccgagaacgaccggcaccacgccctggacgccgtggtggtggcctgctccaccgtggccatgcagcagaagatcacccggttcgtgcggtacaaggagatgaacgccttcgacggcaagaccatcgacaaggagaccggcgaggtgctgcaccagaagacccacttcccccagccctgggagttcttcgcccaggaggtgatgatccgggtgttcggcaagcccgacggcaagcccgagttcgaggaggccgacacccccgagaagctgcggaccctgctggccgagaagctgtcctcccggcccgaggccgtgcacgagtacgtgacccccctgttcgtgtcccgggcccccaaccggaagatgtccggccagggccacatggagaccgtgaagtccgccaagcggctggacgagggcgtgtccgtgctgcgggtgcccctgacccagctgaagctgaaggacctggagaagatggtgaaccgggagcgggagcccaagctgtacgaggccctgaaggcccggctggaggcccacaaggacgaccccgccaaggccttcgccgagcccttctacaagtacgacaaggccggcaaccggacccagcaggtgaaggccgtgcgggtggagcaggtgcagaagaccggcgtgtgggtgcggaaccacaacggcatcgccgacaacgccaccatggtgcgggtggacgtgttcgagaagggcgacaagtactacctggtgcccatctactcctggcaggtggccaagggcatcctgcccgaccgggccgtggtggcctacgccgacgaggaggactggaccgtgatcgacgagtccttccggttcaagttcgtgctgtactccaacgacctgatcaaggtgcagctgaagaaggactccttcctgggctacttctccggcctggaccgggccaccggcgccatctccctgcgggagcacgacctggagaagtccaagggcaaggacggcatgcaccggatcggcgtgaagaccgccctgtccttccagaagtaccagatcgacgagatgggcaaggagatccggccctgccggctgaagaagcggccccccgtgcgg

SEQ ID NO: 286 - DNA, 3240 bp, synthetic construct
  misc_feature 1..3240: note = Synthetic
  source 1..3240: mol_type = other DNA
gcagcattcaaaccaaacccaatcaactacatcctaggactagcaatcggaatcgcatcagtaggatgagcaatggtagaaatcgacgaagaagaaaacccaatccgactaatcgacctaggagtacgagtattcgaacgagcagaagtaccaaaaacaggagactcactagcaatggcacgacgactagcacgatcagtacgacgactaacacgacgacgagcacaccgactactacgagcacgacgactactaaaacgagaaggagtactacaagcagcagacttcgacgaaaacggactaatcaaatcactaccaaacacaccatgacaactacgagcagcagcactagaccgaaaactaacaccactagaatgatcagcagtactactacacctaatcaaacaccgaggatacctatcacaacgaaaaaacgaaggagaaacagcagacaaagaactaggagcactactaaaaggagtagcagacaacgcacacgcactacaaacaggagacttccgaacaccagcagaactagcactaaacaaattcgaaaaagaatgcggacacatccgaaaccaacgaggagactactcacacacattctcacgaaaagacctacaagcagaactaaacctactattcgaaaaacaaaaagaattcggaaacccacacgtatcaggaggactaaaagaaggaatcgaaacactactaatgacacaacgaccagcactatcaggagacgcagtacaaaaaatgctaggacactgcacattcgaaccagcagaaccaaaagcagcaaaaaacacatacacagcagaacgattcatctgactaacaaaactaaacaacctacgaatcctagaacaaggatcagaacgaccactaacagacacagaacgagcaacactaatggacgaaccataccgaaaatcaaaactaacatacgcacaagcacgaaaactactatcactagaagacacagcattcttcaaaggactacgatacggaaaagacaacgcagaagcatcaacactaatggaaatgaaagcataccacacaatctcacgagcactagaaaaagaaggactaaaagacaaaaaatcaccactaaacctatcaccagaactacaagacgaaatcggaacagcattctcactattcaaaacagacgaagacatcacaggacgactaaaagaccgaatccaaccagaaatcctagaagcactactaaaacacatctcattcgacaaattcgtacaaatctcactaaaagcactacgacgaatcgtaccactaatggaacaaggaaaacgatacgacgaagcatgcgcagaaatctacggagaccactacggaaaaaaaaacacagaagaaaaaatctacctaccaccaatcccagcagacgaaatccgaaacccagtagtactacgagcactatcacaagcacgaaaagtaatcaacggagtagtacgacgatacggatcaccagcacgaatccacatcgaaacagcacgagaagtaggaaaatcattcaaagaccgaaaagaaatcgaaaaacgacaagaagaaaaccgaaaagaccgagaaaaagcagcagcaaaattccgagaatacttcccaaacttcgtaggagaaccaaaatcaaaagacatcctaaaactacgactatacgaacaacaacacggaaaatgcctatactcaggaaaagaaatcaacctaggacgactaaacgaaaaaggatacgtagaaatcgacgcagcactaccattctcacgaacatgagacgactcattcaacaacaaagtactagtactaggatcagaaaaccaaaacaaaggaaaccaaacaccatacgaatacttcaacggaaaagacaactcacgagaatgacaagaattcaaagcacgagtagaaacatcacgattcccacgatcaaaaaaacaacgaatcctactacaaaaattcgacgaagacggattcaaagaacgaaacctaaacgacacacgatacgtaaaccgattcctatgccaattcgtagcagaccgaatgcgactaacaggaaaaggaaaaaaacgagtattcgcatcaaacggacaaatcacaaacctactacgaggattctgaggactacgaaaagtacgagcagaaaacgaccgacaccacgcactagacgcagtagtagtagcatgctcaacagtagcaatgcaacaaaaaatcacacgattcgtacgatacaaagaaatgaacgcattcgacggaaaaacaatcgacaaagaaacaggagaagtactacaccaaaaaacacacttcccacaaccatgagaattcttcgcacaagaagtaatgatccgagtattcggaaaaccagacggaaaaccagaattcgaagaagcagacacaccagaaaaactacgaacactactagcagaaaaactatcatcacgaccagaagcagtacacgaatacgtaacaccactattcgtatcacgagcaccaaaccgaaaaatgtcaggacaaggacacatggaaacagtaaaatcagcaaaacgactagacgaaggagtatcagtactacgagtaccactaacacaactaaaactaaaagacctagaaaaaatggtaaaccgagaacgagaaccaaaactatacgaagcactaaaagcacgactagaagcacacaaagacgacccagcaaaagcattcgcagaaccattctacaaatacgacaaagcaggaaaccgaacacaacaagtaaaagcagtacgagtagaacaagtacaaaaaacaggagtatgagtacgaaaccacaacggaatcgcagacaacgcaacaatggtacgagtagacgtattcgaaaaaggagacaaatactacctagtaccaatctactcatgacaagtagcaaaaggaatcctaccagaccgagcagtagtagcatacgcagacgaagaagactgaacagtaatcgacgaatcattccgattcaaattcgtactatactcaaacgacctaatcaaagtacaactaaaaaaagactcattcctaggatacttctcaggactagaccgagcaacaggagcaatctcactacgagaacacgacctagaaaaatcaaaaggaaaagacggaatgcaccgaatcggagtaaaaacagcactatcattccaaaaataccaaatcgacgaaatgggaaaagaaatccgaccatgccgactaaaaaaacgaccaccagtacga

SEQ ID NO: 287 - RNA, 3246 nt, synthetic construct
  modified_base 2: mod_base = OTHER; note = thymine
  modified_base 6: mod_base = OTHER; note = thymine
  modified_base 9..12: mod_base = OTHER; note = thymine
  modified_base 18: mod_base = OTHER; note = thymine
  modified_base 21: mod_base = OTHER; note = thymine
  modified_base 24: mod_base = OTHER; note = thymine
  modified_base 26..27: mod_base = OTHER; note = thymine
  modified_base 30..31: mod_base = OTHER; note = thymine
  modified_base 33: mod_base = OTHER; note = thymine
  modified_base 35..36: mod_base = OTHER; note = thymine
  modified_base 38..39: mod_base = OTHER; note = thymine
  modified_base 42: mod_base = OTHER; note = thymine
  modified_base 44..45: mod_base = OTHER; note = thymine
  modified_base 48: mod_base = OTHER; note = thymine
  modified_base 50..51: mod_base = OTHER; note = thymine
  modified_base 54: mod_base = OTHER; note = thymine
  modified_base 56..57: mod_base = OTHER; note = thymine
  modified_base 60..61: mod_base = OTHER; note = thymine
  modified_base 63: mod_base = OTHER; note = thymine
  modified_base 65..66: mod_base = OTHER; note = thymine
  modified_base 69..70: mod_base = OTHER; note = thymine
  modified_base 75: mod_base = OTHER; note = thymine
  modified_base 77: mod_base = OTHER; note = thymine
  modified_base 80..81: mod_base = OTHER; note = thymine
  modified_base 86..87: mod_base = OTHER; note = thymine
  modified_base 90: mod_base = OTHER; note = thymine
  modified_base 102: mod_base = OTHER; note = thymine
  modified_base 105: mod_base = OTHER; note = thymine
  modified_base 107..108: mod_base = OTHER; note = thymine
  modified_base 111: mod_base = OTHER; note = thymine
  modified_base 113..114: mod_base = OTHER; note = thymine
  modified_base 116..117: mod_base = OTHER; note = thymine
  modified_base 120: mod_base = OTHER; note = thymine
  modified_base 122..123: mod_base = OTHER; note = thymine
  modified_base 126: mod_base = OTHER; note = thymine
  modified_base 128..129: mod_base = OTHER; note = thymine
  modified_base 132: mod_base = OTHER; note = thymine
  modified_base 134..138: mod_base = OTHER; note = thymine
  modified_base 144: mod_base = OTHER; note = thymine
  modified_base 147: mod_base = OTHER; note = thymine
  modified_base 152..153: mod_base = OTHER; note = thymine
  modified_base 156: mod_base = OTHER; note = thymine
  modified_base 162: mod_base = OTHER; note = thymine
  modified_base 165: mod_base = OTHER; note = thymine
  modified_base 168..169: mod_base = OTHER; note = thymine
  modified_base 171: mod_base = OTHER; note = thymine
  modified_base 173..174: mod_base = OTHER; note = thymine
  modified_base 177: mod_base = OTHER; note = thymine
  modified_base 179: mod_base = OTHER; note = thymine
  modified_base 183: mod_base = OTHER; note = thymine
  modified_base 186: mod_base = OTHER; note = thymine
  modified_base 189: mod_base = OTHER; note = thymine
  modified_base 191..192: mod_base = OTHER; note = thymine
  modified_base 195: mod_base = OTHER; note = thymine
  modified_base 198..199: mod_base = OTHER; note = thymine
  modified_base 201: mod_base = OTHER; note = thymine
  modified_base 203..204: mod_base = OTHER; note = thymine
  modified_base 207: mod_base = OTHER; note = thymine
  modified_base 210: mod_base = OTHER; note = thymine
  modified_base 212..213: mod_base = OTHER; note = thymine
  modified_base 216: mod_base = OTHER; note = thymine
  modified_base 219: mod_base = OTHER; note = thymine
  modified_base 222: mod_base = OTHER; note = thymine
  modified_base 225: mod_base = OTHER; note = thymine
  modified_base 228: mod_base = OTHER; note = thymine
  modified_base 231: mod_base = OTHER; note = thymine
  modified_base 234: mod_base = OTHER; note = thymine
  modified_base 236..237: mod_base = OTHER; note = thymine
  modified_base 239..240: mod_base = OTHER; note = thymine
  modified_base 243: mod_base = OTHER; note = thymine
  modified_base 246: mod_base = OTHER; note = thymine
  modified_base 249: mod_base = OTHER; note = thymine
  modified_base 252: mod_base = OTHER; note = thymine
  modified_base 254..255: mod_base = OTHER; note = thymine
  modified_base 257..258: mod_base = OTHER; note = thymine
  modified_base 264: mod_base = OTHER; note = thymine
  modified_base 270: mod_base = OTHER; note = thymine
  modified_base 272..273: mod_base = OTHER; note = thymine
  modified_base 275..276: mod_base = OTHER; note = thymine
  modified_base 282: mod_base = OTHER; note = thymine
  modified_base 285: mod_base = OTHER; note = thymine
  modified_base 288..291: mod_base = OTHER; note = thymine
  modified_base 294: mod_base = OTHER; note = thymine
  modified_base 300: mod_base = OTHER; note = thymine
  modified_base 303: mod_base = OTHER; note = thymine
  modified_base 305..306: mod_base = OTHER; note = thymine
  modified_base 308..309: mod_base = OTHER; note = thymine
  modified_base 313: mod_base = OTHER; note = thymine
  modified_base 315: mod_base = OTHER; note = thymine
  modified_base 317..318: mod_base = OTHER; note = thymine
  modified_base 321: mod_base = OTHER; note = thymine
  modified_base 324: mod_base = OTHER; note = thymine
  modified_base 327: mod_base = OTHER; note = thymine
  modified_base 330..331: mod_base = OTHER; note = thymine
  modified_base 338..339: mod_base = OTHER; note = thymine
  modified_base 342: mod_base = OTHER; note = thymine
  modified_base 345: mod_base = OTHER; note = thymine
  modified_base 348: mod_base = OTHER; note = thymine
  modified_base 351: mod_base = OTHER; note = thymine
  modified_base 353..354: mod_base = OTHER; note = thymine
  modified_base 357: mod_base = OTHER; note = thymine
  modified_base 360: mod_base = OTHER; note = thymine
  modified_base 365..366: mod_base = OTHER; note = thymine
  modified_base 369: mod_base = OTHER; note = thymine
  modified_base 372: mod_base = OTHER; note = thymine
  modified_base 374..375: mod_base = OTHER; note = thymine
  modified_base 379: mod_base = OTHER; note = thymine
  modified_base 382: mod_base = OTHER; note = thymine
  modified_base 384: mod_base = OTHER; note = thymine
  modified_base 387: mod_base = OTHER; note = thymine
  modified_base 389..390: mod_base = OTHER; note = thymine
  modified_base 392..393: mod_base = OTHER; note = thymine
  modified_base 395..396: mod_base = OTHER; note = thymine
  modified_base 399: mod_base = OTHER; note = thymine
  modified_base 401..402: mod_base = OTHER; note = thymine
  modified_base 404..405: mod_base = OTHER; note = thymine
  modified_base 411: mod_base = OTHER; note = thymine
  modified_base 414: mod_base = OTHER; note = thymine
  modified_base 417..418: mod_base = OTHER; note = thymine
  modified_base 420: mod_base = OTHER; note = thymine
  modified_base 422..424: mod_base = OTHER; note = thymine
  modified_base 426: mod_base = OTHER; note = thymine
  modified_base 432: mod_base = OTHER; note = thymine
  modified_base 438: mod_base = OTHER; note = thymine
  modified_base 444: mod_base = OTHER; note = thymine
  modified_base 450: mod_base = OTHER; note = thymine
  modified_base 453: mod_base = OTHER; note = thymine
  modified_base 456: mod_base = OTHER; note = thymine
  modified_base 464..465: mod_base = OTHER; note = thymine
  modified_base 468: mod_base = OTHER; note = thymine
  modified_base 471: mod_base = OTHER; note = thymine
  modified_base 473..474: mod_base = OTHER; note = thymine
  modified_base 476..477: mod_base = OTHER; note = thymine
  modified_base 483: mod_base = OTHER; note = thymine
  modified_base 485..486: mod_base = OTHER; note = thymine
  modified_base 489: mod_base = OTHER; note = thymine
  modified_base 492: mod_base = OTHER; note = thymine
  modified_base 495: mod_base = OTHER; note = thymine
  modified_base 498: mod_base = OTHER; note = thymine
  modified_base 501: mod_base = OTHER; note = thymine
  modified_base 504: mod_base = OTHER; note = thymine
  modified_base 506..507: mod_base = OTHER; note = thymine
  modified_base 513: mod_base = OTHER; note = thymine
  modified_base 516: mod_base = OTHER; note = thymine
  modified_base 519..522: mod_base = OTHER; note = thymine
  modified_base 525: mod_base = OTHER; note = thymine
  modified_base 528: mod_base = OTHER; note = thymine
  modified_base 531: mod_base = OTHER; note = thymine
  modified_base 534: mod_base = OTHER; note = thymine
  modified_base 539..540: mod_base = OTHER; note = thymine
  modified_base 543: mod_base = OTHER; note = thymine
  modified_base 545..546: mod_base = OTHER; note = thymine
  modified_base 549: mod_base = OTHER; note = thymine
  modified_base 553..555: mod_base = OTHER; note = thymine
  modified_base 565: mod_base = OTHER; note = thymine
  modified_base 567: mod_base = OTHER; note = thymine
  modified_base 570: mod_base = OTHER; note = thymine
  modified_base 573: mod_base = OTHER; note = thymine
  modified_base 575..576: mod_base = OTHER; note = thymine
  modified_base 579: mod_base = OTHER; note = thymine
  modified_base 582: mod_base = OTHER; note = thymine
  modified_base 588: mod_base = OTHER; note = thymine
  modified_base 591: mod_base = OTHER; note = thymine
  modified_base 594..595: mod_base = OTHER; note = thymine
  modified_base 597..598: mod_base = OTHER; note = thymine
  modified_base 600: mod_base = OTHER; note = thymine
  modified_base 603: mod_base = OTHER; note = thymine
  modified_base 606..610: mod_base = OTHER; note = thymine
  modified_base 612: mod_base = OTHER; note = thymine
  modified_base 615: mod_base = OTHER; note = thymine
  modified_base 621: mod_base = OTHER; note = thymine
  modified_base 623..624: mod_base = OTHER; note = thymine
  modified_base 630: mod_base = OTHER; note = thymine
  modified_base 635..636: mod_base = OTHER; note = thymine
  modified_base 639: mod_base = OTHER; note = thymine
  modified_base 641..642: mod_base = OTHER; note = thymine
  modified_base 644..648: mod_base = OTHER; note = thymine
  modified_base 664..666: mod_base = OTHER; note = thymine
  modified_base 669: mod_base = OTHER; note = thymine
  modified_base 672: mod_base = OTHER; note = thymine
  modified_base 675: mod_base = OTHER; note = thymine
  modified_base 678: mod_base = OTHER; note = thymine
  modified_base 680..682: mod_base = OTHER; note = thymine
  modified_base 684: mod_base = OTHER; note = thymine
  modified_base 687: mod_base = OTHER; note = thymine
  modified_base 690: mod_base = OTHER; note = thymine
  modified_base 692..693: mod_base = OTHER; note = thymine
  modified_base 702: mod_base = OTHER; note = thymine
  modified_base 704..705: mod_base = OTHER; note = thymine
  modified_base 711: mod_base = OTHER; note = thymine
  modified_base 713..714: mod_base = OTHER; note = thymine
  modified_base 716..717: mod_base = OTHER; note = thymine
  modified_base 719: mod_base = OTHER; note = thymine
  modified_base 723: mod_base = OTHER; note = thymine
  modified_base 729: mod_base = OTHER; note = thymine
  modified_base 732: mod_base = OTHER; note = thymine
  modified_base 735: mod_base = OTHER; note = thymine
  modified_base 737..739: mod_base = OTHER; note = thymine
  modified_base 741: mod_base = OTHER; note = thymine
  modified_base 744: mod_base = OTHER; note = thymine
  modified_base 747: mod_base = OTHER; note = thymine
  modified_base 750: mod_base = OTHER; note = thymine
  modified_base 752..753: mod_base = OTHER; note = thymine
  modified_base 761: mod_base = OTHER; note = thymine
  modified_base 764..765: mod_base = OTHER; note = thymine
  modified_base 768: mod_base = OTHER; note = thymine
  modified_base 771..772: mod_base = OTHER; note = thymine
  modified_base 774: mod_base = OTHER; note = thymine
  modified_base 777..780: mod_base = OTHER; note = thymine
  modified_base 786: mod_base = OTHER; note = thymine
  modified_base 789: mod_base = OTHER; note = thymine
  modified_base 795: mod_base = OTHER; note = thymine
  modified_base 801: mod_base = OTHER; note = thymine
  modified_base 804: mod_base = OTHER; note = thymine
  modified_base 810: mod_base = OTHER; note = thymine
  modified_base 813..814: mod_base = OTHER; note = thymine
  modified_base 816: mod_base = OTHER; note = thymine
  modified_base 819: mod_base = OTHER; note = thymine
  modified_base 822: mod_base = OTHER; note = thymine
  modified_base 828..831: mod_base = OTHER; note = thymine
  modified_base 833..835: mod_base = OTHER; note = thymine
  modified_base 839..840: mod_base = OTHER; note = thymine
  modified_base 843: mod_base = OTHER; note = thymine
  modified_base 848..849: mod_base = OTHER; note = thymine
  modified_base 852: mod_base = OTHER; note = thymine
  modified_base 855: mod_base = OTHER; note = thymine
  modified_base 857..858: mod_base = OTHER; note = thymine
  modified_base 861: mod_base = OTHER; note = thymine
  modified_base 863..864: mod_base = OTHER; note = thymine
  modified_base 866..867: mod_base = OTHER; note = thymine
  modified_base 876..877: mod_base = OTHER; note = thymine
  modified_base 879: mod_base = OTHER; note = thymine
  modified_base 885: mod_base = OTHER; note = thymine
  modified_base 888: mod_base = OTHER; note = thymine
  modified_base 890..891: mod_base = OTHER; note = thymine
  modified_base 894: mod_base = OTHER; note = thymine
  modified_base 897: mod_base = OTHER; note = thymine
  modified_base 900: mod_base = OTHER; note = thymine
  modified_base 906: mod_base = OTHER; note = thymine
  modified_base 909: mod_base = OTHER; note = thymine
  modified_base 912: mod_base = OTHER; note = thymine
  modified_base 914..915: mod_base = OTHER; note = thymine
  modified_base 917: mod_base = OTHER; note = thymine
  modified_base 921: mod_base = OTHER; note = thymine
  modified_base 927..928: mod_base = OTHER; note = thymine
  modified_base 930: mod_base = OTHER; note = thymine
  modified_base 933: mod_base = OTHER; note = thymine
  modified_base 937: mod_base = OTHER; note = thymine
  modified_base 939: mod_base = OTHER; note = thymine
  modified_base 944..945: mod_base = OTHER; note = thymine
  modified_base 948..949: mod_base = OTHER; note = thymine
  modified_base 951: mod_base = OTHER; note = thymine
  modified_base 954: mod_base = OTHER; note = thymine
  modified_base 960: mod_base = OTHER; note = thymine
  modified_base 963: mod_base = OTHER; note = thymine
  modified_base 968..969: mod_base = OTHER; note = thymine
  modified_base 971..973: mod_base = OTHER; note = thymine
  modified_base 975: mod_base = OTHER; note = thymine
  modified_base 977..978: mod_base = OTHER; note = thymine
  modified_base 984: mod_base = OTHER; note = thymine
  modified_base 987: mod_base = OTHER; note = thymine
  modified_base 990..996: mod_base = OTHER; note = thymine
  modified_base 1002: mod_base = OTHER; note = thymine
  modified_base 1004..1005: mod_base = OTHER; note = thymine
  modified_base 1008..1009: mod_base = OTHER; note = thymine
  modified_base 1011: mod_base = OTHER; note = thymine
  modified_base 1014: mod_base = OTHER; note = thymine
  modified_base 1020: mod_base = OTHER; note = thymine
  modified_base 1023: mod_base = OTHER; note = thymine
  modified_base 1026: mod_base = OTHER; note = thymine
  modified_base 1032..1033: mod_base = OTHER; note = thymine
  modified_base 1035: mod_base = OTHER; note = thymine
  modified_base 1038: mod_base = OTHER; note = thymine
  modified_base 1040..1041: mod_base = OTHER; note = thymine
  modified_base 1043: mod_base = OTHER; note = thymine
  modified_base 1049: mod_base = OTHER; note = thymine
  modified_base 1056..1057: mod_base = OTHER; note = thymine
  modified_base 1059: mod_base = OTHER; note = thymine
  modified_base 1062: mod_base = OTHER; note = thymine
  modified_base 1065: mod_base = OTHER; note = thymine
  modified_base 1067..1069: mod_base = OTHER; note = thymine
  modified_base 1071: mod_base = OTHER; note = thymine
  modified_base 1074: mod_base = OTHER; note = thymine
  modified_base 1077: mod_base = OTHER; note = thymine
  modified_base 1079..1080: mod_base = OTHER; note = thymine
  modified_base 1092: mod_base = OTHER; note = thymine
  modified_base 1094..1095: mod_base = OTHER; note = thymine
  modified_base 1101: mod_base = OTHER; note = thymine
  modified_base 1108: mod_base = OTHER; note = thymine
  modified_base 1110: mod_base = OTHER; note = thymine
  modified_base 1113: mod_base = OTHER; note = thymine
  modified_base 1115..1116: mod_base = OTHER; note = thymine
  modified_base 1119: mod_base = OTHER; note = thymine
  modified_base 1121..1123: mod_base = OTHER; note = thymine
  modified_base 1125: mod_base = OTHER; note = thymine
  modified_base 1128: mod_base = OTHER; note = thymine
  modified_base 1133..1134: mod_base = OTHER; note = thymine
  modified_base 1140: mod_base = OTHER; note = thymine
  modified_base 1145..1146: mod_base = OTHER; note = thymine
  modified_base 1149: mod_base = OTHER; note = thymine
  modified_base 1152: mod_base = OTHER; note = thymine
  modified_base 1155..1159: mod_base = OTHER; note = thymine
  modified_base 1161: mod_base = OTHER; note = thymine
  modified_base 1163..1167: mod_base = OTHER; note = thymine
  modified_base 1173: mod_base = OTHER; note = thymine
  modified_base 1176: mod_base = OTHER; note = thymine
  modified_base 1182: mod_base = OTHER; note = thymine
  modified_base 1184..1185: mod_base = OTHER; note = thymine
  modified_base 1188: mod_base = OTHER; note = thymine
  modified_base 1191: mod_base = OTHER; note = thymine
  modified_base 1194: mod_base = OTHER; note = thymine
  modified_base 1196..1197: mod_base = OTHER; note = thymine
  modified_base 1203: mod_base = OTHER; note = thymine
  modified_base 1206: mod_base = OTHER; note = thymine
  modified_base 1208..1209: mod_base = OTHER; note = thymine
  modified_base 1215: mod_base = OTHER; note = thymine
  modified_base 1220..1221: mod_base = OTHER; note = thymine
  modified_base 1223..1224: mod_base = OTHER; note = thymine
  modified_base 1230: mod_base = OTHER; note = thymine
  modified_base 1232..1233: mod_base = OTHER; note = thymine
  modified_base 1235..1236: mod_base = OTHER; note = thymine
  modified_base 1242: mod_base = OTHER; note = thymine
  modified_base 1244..1246: mod_base = OTHER; note = thymine
  modified_base 1248..1251: mod_base = OTHER; note = thymine
  modified_base 1254: mod_base = OTHER; note = thymine
  modified_base 1258..1260: mod_base = OTHER; note = thymine
  modified_base 1262..1263: mod_base = OTHER; note = thymine
  modified_base 1268..1270: mod_base = OTHER; note = thymine
  modified_base 1272: mod_base = OTHER; note = thymine
  modified_base 1274..1275: mod_base = OTHER; note = thymine
  modified_base 1281: mod_base = OTHER; note = thymine
  modified_base 1283..1284: mod_base = OTHER; note = thymine
  modified_base 1287: mod_base = OTHER; note = thymine
  modified_base 1290: mod_base = OTHER; note = thymine
  modified_base 1292..1293: mod_base = OTHER; note = thymine
  modified_base 1295..1296: mod_base = OTHER; note = thymine
  modified_base 1299: mod_base = OTHER; note = thymine
  modified_base 1301..1302: mod_base = OTHER; note = thymine
  modified_base 1304: mod_base = OTHER; note = thymine
  modified_base 1314: mod_base = OTHER; note = thymine
  modified_base 1320..1321: mod_base = OTHER; note = thymine
  modified_base 1323: mod_base = OTHER; note = thymine
  modified_base 1326: mod_base = OTHER; note = thymine
  modified_base 1332..1333: mod_base = OTHER; note = thymine
  modified_base 1335: mod_base = OTHER; note = thymine
  modified_base 1338: mod_base = OTHER; note = thymine
  modified_base 1343..1345: mod_base = OTHER; note = thymine
  modified_base 1347: mod_base = OTHER; note = thymine
  modified_base 1350: mod_base = OTHER; note = thymine
  modified_base 1353: mod_base = OTHER; note = thymine
  modified_base 1356..1357: mod_base = OTHER; note = thymine
  modified_base 1359: mod_base = OTHER; note = thymine
  modified_base 1362: mod_base = OTHER; note = thymine
  modified_base 1371: mod_base = OTHER; note = thymine
  modified_base 1374: mod_base = OTHER; note = thymine
  modified_base 1385..1387: mod_base = OTHER; note = thymine
  modified_base 1389: mod_base = OTHER; note = thymine
  modified_base 1391..1392: mod_base = OTHER; note = thymine
  modified_base 1395: mod_base = OTHER; note = thymine
  modified_base 1398: mod_base = OTHER; note = thymine
  modified_base 1400..1401: mod_base = OTHER; note = thymine
  modified_base 1404: mod_base = OTHER; note = thymine
  modified_base 1407: mod_base = OTHER; note = thymine
  modified_base 1410: mod_base = OTHER; note = thymine
  modified_base 1415..1416: mod_base = OTHER; note = thymine
  modified_base 1419: mod_base = OTHER; note = thymine
  modified_base 1422: mod_base = OTHER; note = thymine
  modified_base 1425: mod_base = OTHER; note = thymine
  modified_base 1427..1428: mod_base = OTHER; note = thymine
  modified_base 1430..1431: mod_base = OTHER; note = thymine
  modified_base 1433..1434: mod_base = OTHER; note = thymine
  modified_base 1437: mod_base = OTHER; note = thymine
  modified_base 1440: mod_base = OTHER; note = thymine
  modified_base 1442..1444: mod_base = OTHER; note = thymine
  modified_base 1446: mod_base = OTHER; note = thymine
  modified_base 1452: mod_base = OTHER; note = thymine
  modified_base 1455: mod_base = OTHER; note = thymine
  modified_base 1460..1461: mod_base = OTHER; note = thymine
  modified_base 1463..1464: mod_base = OTHER; note = thymine
  modified_base 1467: mod_base = OTHER; note = thymine
  modified_base 1470: mod_base = OTHER; note = thymine
  modified_base 1472..1473: mod_base = OTHER; note = thymine
  modified_base 1475..1476: mod_base = OTHER; note = thymine
  modified_base 1479: mod_base = OTHER; note = thymine
  modified_base 1482..1483: mod_base = OTHER; note = thymine
  modified_base 1485: mod_base = OTHER; note = thymine
  modified_base 1488..1489: mod_base = OTHER; note = thymine
  modified_base 1491: mod_base = OTHER; note = thymine
  modified_base 1494: mod_base = OTHER; note = thymine
  modified_base 1497: mod_base = OTHER; note = thymine
  modified_base 1500: mod_base = OTHER; note = thymine
  modified_base 1502..1503: mod_base = OTHER; note = thymine
  modified_base 1506: mod_base = OTHER; note = thymine
  modified_base 1508..1509: mod_base = OTHER; note = thymine
  modified_base 1515: mod_base = OTHER; note = thymine
  modified_base 1518: mod_base = OTHER; note = thymine
  modified_base 1521: mod_base = OTHER; note = thymine
  modified_base 1526..1527: mod_base = OTHER; note = thymine
  modified_base 1530: mod_base = OTHER; note = thymine
  modified_base 1534: mod_base = OTHER; note = thymine
  modified_base 1536..1539: mod_base = OTHER; note = thymine
  modified_base 1545: mod_base = OTHER; note = thymine
  modified_base 1548: mod_base = OTHER; note = thymine
  modified_base 1556..1557: mod_base = OTHER; note = thymine
  modified_base 1566: mod_base = OTHER; note = thymine
  modified_base 1578: mod_base = OTHER; note = thymine
  modified_base 1581: mod_base = OTHER; note = thymine
  modified_base 1587: mod_base = OTHER; note = thymine
  modified_base 1590: mod_base = OTHER; note = thymine
  modified_base 1599: mod_base = OTHER; note = thymine
  modified_base 1602: mod_base = OTHER; note = thymine
  modified_base 1605: mod_base = OTHER; note = thymine
  modified_base 1609..1611: mod_base = OTHER; note = thymine
  modified_base 1614: mod_base = OTHER; note = thymine
  modified_base 1618: mod_base = OTHER; note = thymine
  modified_base 1620..1623: mod_base = OTHER; note = thymine
  modified_base 1626: mod_base = OTHER; note = thymine
  modified_base 1629..1632: mod_base = OTHER; note = thymine
  modified_base 1634..1635: mod_base = OTHER; note = thymine
  modified_base 1638: mod_base = OTHER; note = thymine
  modified_base 1644: mod_base = OTHER; note = thymine
  modified_base 1648: mod_base = OTHER; note = thymine
  modified_base 1650: mod_base = OTHER; note = thymine
  modified_base 1656: mod_base = OTHER; note = thymine
  modified_base 1658..1659: mod_base = OTHER; note = thymine
  modified_base 1661..1662: mod_base = OTHER; note = thymine
  modified_base 1667..1668: mod_base = OTHER; note = thymine
  modified_base 1671: mod_base = OTHER; note = thymine
  modified_base 1673..1675: mod_base = OTHER; note = thymine
  modified_base 1677: mod_base = OTHER; note = thymine
  modified_base 1689: mod_base = OTHER; note = thymine
  modified_base 1692: mod_base = OTHER; note = thymine
  modified_base 1696: mod_base = OTHER; note = thymine
  modified_base 1698: mod_base = OTHER; note = thymine
  modified_base 1700..1702: mod_base = OTHER; note = thymine
  modified_base 1704..1705: mod_base = OTHER; note = thymine
  modified_base 1707: mod_base = OTHER; note = thymine
  modified_base 1710: mod_base = OTHER; note = thymine
  modified_base 1718..1719: mod_base = OTHER; note = thymine
  modified_base 1722: mod_base = OTHER; note = thymine
  modified_base 1724..1725: mod_base = OTHER; note = thymine
  modified_base 1728: mod_base = OTHER; note = thymine
  modified_base 1731: mod_base = OTHER; note = thymine
  modified_base 1733..1734: mod_base = OTHER; note = thymine
  modified_base 1737: mod_base = OTHER; note = thymine
  modified_base 1746..1747: mod_base = OTHER; note = thymine
  modified_base 1749: mod_base = OTHER; note = thymine
  modified_base 1751..1752: mod_base = OTHER; note = thymine
  modified_base 1757..1758: mod_base = OTHER; note = thymine
  modified_base 1761: mod_base = OTHER; note = thymine
  modified_base 1764: mod_base = OTHER; note = thymine
  modified_base 1767: mod_base = OTHER; note = thymine
  modified_base 1769..1770: mod_base = OTHER; note = thymine
  modified_base 1773..1777: mod_base = OTHER; note = thymine
  modified_base 1779: mod_base = OTHER; note = thymine
  modified_base 1782: mod_base = OTHER; note = thymine
  modified_base 1785..1786: mod_base = OTHER; note = thymine
  modified_base 1791: mod_base = OTHER; note = thymine
  modified_base 1794..1795: mod_base = OTHER; note = thymine
  modified_base 1797..1800: mod_base = OTHER; note = thymine
  modified_base 1803: mod_base = OTHER; note = thymine
  modified_base 1806: mod_base = OTHER; note = thymine
  modified_base 1811..1812: mod_base = OTHER; note = thymine
  modified_base 1814..1815: mod_base = OTHER; note = thymine
  modified_base 1817..1818: mod_base = OTHER; note = thymine
  modified_base 1820..1821: mod_base = OTHER; note = thymine
  modified_base 1824..1825: mod_base = OTHER; note = thymine
  modified_base 1827: mod_base = OTHER; note = thymine
  modified_base 1833: mod_base = OTHER; note = thymine
  modified_base 1839: mod_base = OTHER; note = thymine
  modified_base 1845: mod_base = OTHER; note = thymine
  modified_base 1848: mod_base = OTHER; note = thymine
  modified_base 1854: mod_base = OTHER; note = thymine
  modified_base 1857..1858: mod_base = OTHER; note = thymine
  modified_base 1860: mod_base = OTHER; note = thymine
  modified_base 1864: mod_base = OTHER; note = thymine
  modified_base 1866..1869: mod_base = OTHER; note = thymine
  modified_base 1872: mod_base = OTHER; note = thymine
  modified_base 1875: mod_base = OTHER; note = thymine
  modified_base 1881: mod_base = OTHER; note = thymine
  modified_base 1884..1885: mod_base = OTHER; note = thymine
  modified_base 1887: mod_base = OTHER; note = thymine
  modified_base 1890: mod_base = OTHER; note = thymine
  modified_base 1894: mod_base = OTHER; note = thymine
  modified_base 1903..1905: mod_base = OTHER; note = thymine
  modified_base 1911: mod_base = OTHER; note = thymine
  modified_base 1914: mod_base = OTHER; note = thymine
  modified_base 1916..1917: mod_base = OTHER; note = thymine
  modified_base 1923..1924: mod_base = OTHER; note = thymine
  modified_base 1926: mod_base = OTHER; note = thymine
  modified_base 1929..1932: mod_base = OTHER; note = thymine
  modified_base 1935: mod_base = OTHER; note = thymine
  modified_base 1938..1939: mod_base = OTHER; note = thymine
  modified_base 1941: mod_base = OTHER; note = thymine
  modified_base 1953: mod_base = OTHER; note = thymine
  modified_base 1955..1956: mod_base = OTHER; note = thymine
  modified_base 1958..1959: mod_base = OTHER; note = thymine
  modified_base 1961..1962: mod_base = OTHER; note = thymine
  modified_base 1969..1971: mod_base = OTHER; note = thymine
  modified_base 1974: mod_base = OTHER; note = thymine
  modified_base 1980: mod_base = OTHER; note = thymine
  modified_base 1983..1986: mod_base = OTHER; note = thymine
  modified_base 1995: mod_base = OTHER; note = thymine
  modified_base 1998: mod_base = OTHER; note = thymine
  modified_base 2000..2001: mod_base = OTHER; note = thymine
  modified_base 2004: mod_base = OTHER; note = thymine
  modified_base 2007: mod_base = OTHER; note = thymine
  modified_base 2010: mod_base = OTHER; note = thymine
  modified_base 2013..2014: mod_base = OTHER; note = thymine
  modified_base 2016: mod_base = OTHER; note = thymine
  modified_base 2018..2019: mod_base = OTHER; note = thymine
  modified_base 2022: mod_base = OTHER; note = thymine
  modified_base 2025..2028: mod_base = OTHER; note = thymine
  modified_base 2030..2032: mod_base = OTHER; note = thymine
  modified_base 2034: mod_base = OTHER; note = thymine
  modified_base 2038..2040: mod_base = OTHER; note = thymine
  modified_base 2042..2043: mod_base = OTHER; note = thymine
  modified_base 2046: mod_base = OTHER; note = thymine
  modified_base 2049: mod_base = OTHER; note = thymine
  modified_base 2052: mod_base = OTHER; note = thymine
  modified_base 2054: mod_base = OTHER; note = thymine
  modified_base 2058: mod_base = OTHER; note = thymine
  modified_base 2060..2061: mod_base = OTHER; note = thymine
  modified_base 2064: mod_base = OTHER; note = thymine
  modified_base 2067: mod_base = OTHER; note = thymine
  modified_base 2073: mod_base = OTHER; note = thymine
  modified_base 2082: mod_base = OTHER; note = thymine
  modified_base 2084..2088: mod_base = OTHER; note = thymine
  modified_base 2091..2092: mod_base = OTHER; note = thymine
  modified_base 2094: mod_base = OTHER; note = thymine
  modified_base 2097: mod_base = OTHER; note = thymine
  modified_base 2100: mod_base = OTHER; note = thymine
  modified_base 2105..2106: mod_base = OTHER; note = thymine
  modified_base 2109: mod_base = OTHER; note = thymine
  modified_base 2112: mod_base = OTHER; note = thymine
  modified_base 2114..2115: mod_base = OTHER; note = thymine
  modified_base 2117..2118: mod_base = OTHER; note = thymine
  modified_base 2121: mod_base = OTHER; note = thymine
  modified_base 2124..2128: mod_base = OTHER; note = thymine
  modified_base 2133: mod_base = OTHER; note = thymine
  modified_base 2135..2136: mod_base = OTHER; note = thymine
  modified_base 2139: mod_base = OTHER; note = thymine
  modified_base 2144..2145: mod_base = OTHER; note = thymine
  modified_base 2148: mod_base = OTHER; note = thymine
  modified_base 2151: mod_base = OTHER; note = thymine
  modified_base 2157: mod_base = OTHER; note = thymine
  modified_base 2160: mod_base = OTHER; note = thymine
  modified_base 2163: mod_base = OTHER; note = thymine
  modified_base 2166: mod_base = OTHER; note = thymine
  modified_base 2169: mod_base = OTHER; note = thymine
  modified_base 2172: mod_base = OTHER; note = thymine
  modified_base 2174..2175: mod_base = OTHER; note = thymine
  modified_base 2178: mod_base = OTHER; note = thymine
  modified_base 2181: mod_base = OTHER; note = thymine
  modified_base 2183..2184: mod_base = OTHER; note = thymine
  modified_base 2186..2187: mod_base = OTHER; note = thymine
  modified_base 2189..2190: mod_base = OTHER; note = thymine
  modified_base 2193..2194: mod_base = OTHER; note = thymine
  modified_base 2196..2197: mod_base = OTHER; note = thymine
  modified_base 2199: mod_base = OTHER; note = thymine
  modified_base 2202: mod_base = OTHER; note = thymine
  modified_base 2204..2205: mod_base = OTHER; note = thymine
  modified_base 2208: mod_base = OTHER; note = thymine
  modified_base 2210: mod_base = OTHER; note = thymine
  modified_base 2222..2223: mod_base = OTHER; note = thymine
  modified_base 2226: mod_base = OTHER; note = thymine
  modified_base 2229..2232: mod_base = OTHER; note = thymine
  modified_base 2234..2235: mod_base = OTHER; note = thymine
  modified_base 2238..2239: mod_base = OTHER; note = thymine
  modified_base 2241: mod_base = OTHER; note = thymine
  modified_base 2249: mod_base = OTHER; note = thymine
  modified_base 2253: mod_base = OTHER; note = thymine
  modified_base 2256..2259: mod_base = OTHER; note = thymine
  modified_base 2262: mod_base = OTHER; note = thymine
  modified_base 2265: mod_base = OTHER; note = thymine
  modified_base 2271: mod_base = OTHER; note = thymine
  modified_base 2273..2274: mod_base = OTHER; note = thymine
  modified_base 2277: mod_base = OTHER; note = thymine
  modified_base 2286: mod_base = OTHER; note = thymine
  modified_base 2289: mod_base = OTHER; note = thymine
  modified_base 2294..2295: mod_base = OTHER; note = thymine
  modified_base 2297..2298: mod_base = OTHER; note = thymine
  modified_base 2301: mod_base = OTHER; note = thymine
  modified_base 2310: mod_base = OTHER; note = thymine
  modified_base 2313..2316: mod_base = OTHER; note = thymine
  modified_base 2319: mod_base = OTHER; note = thymine
  modified_base 2325..2326: mod_base = OTHER; note = thymine
  modified_base 2332..2337: mod_base = OTHER; note = thymine
  modified_base 2340: mod_base = OTHER; note = thymine
  modified_base 2348..2349: mod_base = OTHER; note = thymine
  modified_base 2351: mod_base = OTHER; note = thymine
  modified_base 2354..2355: mod_base = OTHER; note = thymine
  modified_base 2358: mod_base = OTHER; note = thymine
  modified_base 2360..2364: mod_base = OTHER; note = thymine
  modified_base 2367: mod_base = OTHER; note = thymine
  modified_base 2373: mod_base = OTHER; note = thymine
  modified_base 2376: mod_base = OTHER; note = thymine
  modified_base 2379: mod_base = OTHER; note = thymine
  modified_base 2385: mod_base = OTHER; note = thymine
  modified_base 2389..2391: mod_base = OTHER; note = thymine
  modified_base 2400: mod_base = OTHER; note = thymine
  modified_base 2403: mod_base = OTHER; note = thymine
  modified_base 2406: mod_base = OTHER; note = thymine
  modified_base 2409: mod_base = OTHER; note = thymine
  modified_base 2417..2418: mod_base = OTHER; note = thymine
  modified_base 2421: mod_base = OTHER; note = thymine
  modified_base 2424: mod_base = OTHER; note = thymine
  modified_base 2426..2427: mod_base = OTHER; note = thymine
  modified_base 2429..2430: mod_base = OTHER; note = thymine
  modified_base 2433: mod_base = OTHER; note = thymine
  modified_base 2441..2443: mod_base = OTHER; note = thymine
  modified_base 2445..2446: mod_base = OTHER; note = thymine
  modified_base 2448: mod_base = OTHER; note = thymine
  modified_base 2451: mod_base = OTHER; note = thymine
  modified_base 2454: mod_base = OTHER; note = thymine
  modified_base 2460: mod_base = OTHER; note = thymine
  modified_base 2462..2463: mod_base = OTHER; note = thymine
  modified_base 2466: mod_base = OTHER; note = thymine
  modified_base 2470: mod_base = OTHER; note = thymine
  modified_base 2472: mod_base = OTHER; note = thymine
  modified_base 2474..2475: mod_base = OTHER; note = thymine
  modified_base 2478: mod_base = OTHER; note = thymine
  modified_base 2481: mod_base = OTHER; note = thymine
  modified_base 2483..2487: mod_base = OTHER; note = thymine
  modified_base 2489..2491: mod_base = OTHER; note = thymine
  modified_base 2493: mod_base = OTHER; note = thymine
  modified_base 2496: mod_base = OTHER; note = thymine
  modified_base 2499: mod_base = OTHER; note = thymine
  modified_base 2502: mod_base = OTHER; note = thymine
  modified_base 2505: mod_base = OTHER; note = thymine
  modified_base 2508: mod_base = OTHER; note = thymine
  modified_base 2513: mod_base = OTHER; note = thymine
  modified_base 2515: mod_base = OTHER; note = thymine
  modified_base 2517: mod_base = OTHER; note = thymine
  modified_base 2520: mod_base = OTHER; note = thymine
  modified_base 2526: mod_base = OTHER; note = thymine
  modified_base 2529: mod_base = OTHER; note = thymine
  modified_base 2531: mod_base = OTHER; note = thymine
  modified_base 2538: mod_base = OTHER; note = thymine
  modified_base 2540..2541: mod_base = OTHER; note = thymine
  modified_base 2545: mod_base = OTHER; note = thymine
  modified_base 2547: mod_base = OTHER; note = thymine
  modified_base 2550: mod_base = OTHER; note = thymine
  modified_base 2556: mod_base = OTHER; note = thymine
  modified_base 2558..2559: mod_base = OTHER; note = thymine
  modified_base 2562: mod_base = OTHER; note = thymine
  modified_base 2568: mod_base = OTHER; note = thymine
  modified_base 2570..2572: mod_base = OTHER; note = thymine
  modified_base 2574: mod_base = OTHER; note = thymine
  modified_base 2576..2577: mod_base = OTHER; note = thymine
  modified_base 2579..2580: mod_base = OTHER; note = thymine
  modified_base 2583: mod_base = OTHER; note = thymine
  modified_base 2585..2586: mod_base = OTHER; note = thymine
  modified_base 2589: mod_base = OTHER; note = thymine
  modified_base 2591..2592: mod_base = OTHER; note = thymine
  modified_base 2595: mod_base = OTHER; note = thymine
  modified_base 2600..2601: mod_base = OTHER; note = thymine
  modified_base 2606..2607: mod_base = OTHER; note = thymine
  modified_base 2613: mod_base = OTHER; note = thymine
  modified_base 2615..2616: mod_base = OTHER; note = thymine
  modified_base 2624: mod_base = OTHER; note = thymine
  modified_base 2627..2628: mod_base = OTHER; note = thymine
  modified_base 2631: mod_base = OTHER; note = thymine
  modified_base 2634: mod_base = OTHER; note = thymine
  modified_base 2640: mod_base = OTHER; note = thymine
  modified_base 2646: mod_base = OTHER; note = thymine
  modified_base 2651..2653: mod_base = OTHER; note = thymine
  modified_base 2655: mod_base = OTHER; note = thymine
  modified_base 2661: mod_base = OTHER; note = thymine
  modified_base 2663..2664: mod_base = OTHER; note = thymine
  modified_base 2670: mod_base = OTHER; note = thymine
  modified_base 2673: mod_base = OTHER; note = thymine
  modified_base 2675..2676: mod_base = OTHER; note = thymine
  modified_base 2682: mod_base = OTHER; note = thymine
  modified_base 2685: mod_base = OTHER; note = thymine
  modified_base 2691: mod_base = OTHER; note = thymine
  modified_base 2694: mod_base = OTHER; note = thymine
  modified_base 2697: mod_base = OTHER; note = thymine
  modified_base 2700: mod_base = OTHER; note = thymine
  modified_base 2706..2709: mod_base = OTHER; note = thymine
  modified_base 2712: mod_base = OTHER; note = thymine
  modified_base 2718..2722: mod_base = OTHER; note = thymine
  modified_base 2724: mod_base = OTHER; note = thymine
  modified_base 2728: mod_base = OTHER; note = thymine
  modified_base 2730: mod_base = OTHER; note = thymine
  modified_base 2733: mod_base = OTHER; note = thymine
  modified_base 2739: mod_base = OTHER; note = thymine
  modified_base 2742: mod_base = OTHER; note = thymine
  modified_base 2745: mod_base = OTHER; note = thymine
  modified_base 2748: mod_base = OTHER; note = thymine
  modified_base 2751: mod_base = OTHER; note = thymine
  modified_base 2759..2760: mod_base = OTHER; note = thymine
  modified_base 2766: mod_base = OTHER; note = thymine
  modified_base 2768..2769: mod_base = OTHER; note = thymine
  modified_base 2772: mod_base = OTHER; note = thymine
  modified_base 2774..2775: mod_base = OTHER; note = thymine
  modified_base 2783..2784: mod_base = OTHER; note = thymine
  modified_base 2793: mod_base = OTHER; note = thymine
  modified_base 2796: mod_base = OTHER; note = thymine
  modified_base 2798..2800: mod_base = OTHER; note = thymine
  modified_base 2804..2805: mod_base = OTHER; note = thymine
  modified_base 2808: mod_base = OTHER; note = thymine
  modified_base 2811: mod_base = OTHER; note = thymine
  modified_base 2814: mod_base = OTHER; note = thymine
  modified_base 2817: mod_base = OTHER; note = thymine
  modified_base 2820: mod_base = OTHER; note = thymine
  modified_base 2822..2823: mod_base = OTHER; note = thymine
  modified_base 2826: mod_base = OTHER; note = thymine
  modified_base 2829: mod_base = OTHER; note = thymine
  modified_base 2832: mod_base = OTHER; note = thymine
  modified_base 2835: mod_base = OTHER; note = thymine
  modified_base 2838: mod_base = OTHER; note = thymine
  modified_base 2840: mod_base = OTHER; note = thymine
  modified_base 2843..2844: mod_base = OTHER; note = thymine
  modified_base 2847: mod_base = OTHER; note = thymine
  modified_base 2849..2850: mod_base = OTHER; note = thymine
  modified_base 2853: mod_base = OTHER; note = thymine
  modified_base 2855..2859: mod_base = OTHER; note = thymine
  modified_base 2868: mod_base = OTHER; note = thymine
  modified_base 2871: mod_base = OTHER; note = thymine
  modified_base 2875: mod_base = OTHER; note = thymine
  modified_base 2877..2878: mod_base = OTHER; note = thymine
  modified_base 2880: mod_base = OTHER; note = thymine
  modified_base 2882..2883: mod_base = OTHER; note = thymine
  modified_base 2885..2886: mod_base = OTHER; note = thymine
  modified_base 2889: mod_base = OTHER; note = thymine
  modified_base 2891..2893: mod_base = OTHER; note = thymine
  modified_base 2895..2896: mod_base = OTHER; note = thymine
  modified_base 2898..2899: mod_base = OTHER; note = thymine
  modified_base 2906..2907: mod_base = OTHER; note = thymine
  modified_base 2910: mod_base = OTHER; note = thymine
  modified_base 2916: mod_base = OTHER; note = thymine
  modified_base 2918..2919: mod_base = OTHER; note = thymine
  modified_base 2921..2922: mod_base = OTHER; note = thymine
  modified_base 2925: mod_base = OTHER; note = thymine
  modified_base 2928: mod_base = OTHER; note = thymine
  modified_base 2931: mod_base = OTHER; note = thymine
  modified_base 2934: mod_base = OTHER; note = thymine
  modified_base 2936..2937: mod_base = OTHER; note = thymine
  modified_base 2939..2940: mod_base = OTHER; note = thymine
  modified_base 2943..2944: mod_base = OTHER; note = thymine
  modified_base 2946: mod_base = OTHER; note = thymine
  modified_base 2949: mod_base = OTHER; note = thymine
  modified_base 2952: mod_base = OTHER; note = thymine
  modified_base 2961..2962: mod_base = OTHER; note = thymine
  modified_base 2967: mod_base = OTHER; note = thymine
  modified_base 2969..2970: mod_base = OTHER; note = thymine
  modified_base 2972..2973: mod_base = OTHER; note = thymine
  modified_base 2976: mod_base = OTHER; note = thymine
  modified_base 2980: mod_base = OTHER; note = thymine
  modified_base 2982..2985: mod_base = OTHER; note = thymine
  modified_base 2988..2991: mod_base = OTHER; note = thymine
  modified_base 2995..2997: mod_base = OTHER; note = thymine
  modified_base 2999..3000: mod_base = OTHER; note = thymine
  modified_base 3002..3004: mod_base = OTHER; note = thymine
  modified_base 3006..3007: mod_base = OTHER; note = thymine
  modified_base 3009: mod_base = OTHER; note = thymine
  modified_base 3012: mod_base = OTHER; note = thymine
  modified_base 3015: mod_base = OTHER; note = thymine
  modified_base 3017..3018: mod_base = OTHER; note = thymine
  modified_base 3020..3021: mod_base = OTHER; note = thymine
  modified_base 3026..3027: mod_base = OTHER; note = thymine
  modified_base 3032..3033: mod_base = OTHER; note = thymine
  modified_base 3042..3043: mod_base = OTHER; note = thymine
  modified_base 3045..3048: mod_base = OTHER; note = thymine
  modified_base 3050..3051: mod_base = OTHER; note = thymine
  modified_base 3054..3055: mod_base = OTHER; note = thymine
  modified_base 3057..3061: mod_base = OTHER; note = thymine
  modified_base 3063: mod_base = OTHER; note = thymine
  modified_base 3066: mod_base = OTHER; note = thymine
  modified_base 3068..3069: mod_base = OTHER; note = thymine
  modified_base 3072: mod_base = OTHER; note = thymine
  modified_base 3075: mod_base = OTHER; note = thymine
  modified_base 3078: mod_base = OTHER; note = thymine
  modified_base 3081: mod_base = OTHER; note = thymine
  modified_base 3084: mod_base = OTHER; note = thymine
  modified_base 3087: mod_base = OTHER; note = thymine
  modified_base 3089..3091: mod_base = OTHER; note = thymine
  modified_base 3093: mod_base = OTHER; note = thymine
  modified_base 3095..3096: mod_base = OTHER; note = thymine
  modified_base 3099: mod_base = OTHER; note = thymine
  modified_base 3105: mod_base = OTHER; note = thymine
  modified_base 3108: mod_base = OTHER; note = thymine
  modified_base 3110..3111: mod_base = OTHER; note = thymine
  modified_base 3118: mod_base = OTHER; note = thymine
  modified_base 3120: mod_base = OTHER; note = thymine
  modified_base 3126: mod_base = OTHER; note = thymine
  modified_base 3132: mod_base = OTHER; note = thymine
  modified_base 3135: mod_base = OTHER; note = thymine
  modified_base 3137: mod_base = OTHER; note = thymine
  modified_base 3141: mod_base = OTHER; note = thymine
  modified_base 3144: mod_base = OTHER; note = thymine
  modified_base 3146..3147: mod_base = OTHER; note = thymine
  modified_base 3150: mod_base = OTHER; note = thymine
  modified_base 3152..3153: mod_base = OTHER; note = thymine
  modified_base 3159: mod_base = OTHER; note = thymine
  modified_base 3162: mod_base = OTHER; note = thymine
  modified_base 3164..3166: mod_base = OTHER; note = thymine
  modified_base 3168..3171: mod_base = OTHER; note = thymine
  modified_base 3178: mod_base = OTHER; note = thymine
  modified_base 3180: mod_base = OTHER; note = thymine
  modified_base 3185..3186: mod_base = OTHER; note = thymine
  modified_base 3189: mod_base = OTHER; note = thymine
  modified_base 3194: mod_base = OTHER; note = thymine
  modified_base 3198: mod_base = OTHER; note = thymine
  modified_base 3206..3207: mod_base = OTHER; note = thymine
  modified_base 3210: mod_base = OTHER; note = thymine
  modified_base 3213..3214: mod_base = OTHER; note = thymine
  modified_base 3216: mod_base = OTHER; note = thymine
  modified_base 3219: mod_base = OTHER; note = thymine
  modified_base 3221..3222: mod_base = OTHER; note = thymine
  modified_base 3231: mod_base = OTHER; note = thymine
  modified_base 3234: mod_base = OTHER; note = thymine
  modified_base 3237: mod_base = OTHER; note = thymine
  modified_base 3239..3240: mod_base = OTHER; note = thymine
  modified_base 3243: mod_base = OTHER; note = thymine
  misc_feature 1..3246: note = Synthetic
  source 1..3246: mol_type = other RNA
atggctgcttttaagcctaatcctattaattatattcttggtcttgctattggtattgcttctgttggttgggctatggttgagattgatgaggaggagaatcctattcgtcttattgatcttggtgttcgtgtttttgagcgtgctgaggttcctaagactggtgattctcttgctatggctcgtcgtcttgctcgttctgttcgtcgtcttactcgtcgtcgtgctcatcgtcttcttcgtgctcgtcgtcttcttaagcgtgagggtgttcttcaggctgctgattttgatgagaatggtcttattaagtctcttcctaatactccttggcagcttcgtgctgctgctcttgatcgtaagcttactcctcttgagtggtctgctgttcttcttcatcttattaagcatcgtggttatctttctcagcgtaagaatgagggtgagactgctgataaggagcttggtgctcttcttaagggtgttgctgataatgctcatgctcttcagactggtgattttcgtactcctgctgagcttgctcttaataagtttgagaaggagtgtggtcatattcgtaatcagcgtggtgattattctcatactttttctcgtaaggatcttcaggctgagcttaatcttctttttgagaagcagaaggagtttggtaatcctcatgtttctggtggtcttaaggagggtattgagactcttcttatgactcagcgtcctgctctttctggtgatgctgttcagaagatgcttggtcattgtacttttgagcctgctgagcctaaggctgctaagaatacttatactgctgagcgttttatttggcttactaagcttaataatcttcgtattcttgagcagggttctgagcgtcctcttactgatactgagcgtgctactcttatggatgagccttatcgtaagtctaagcttacttatgctcaggctcgtaagcttctttctcttgaggatactgctttttttaagggtcttcgttatggtaaggataatgctgaggcttctactcttatggagatgaaggcttatcatactatttctcgtgctcttgagaaggagggtcttaaggataagaagtctcctcttaatctttctcctgagcttcaggatgagattggtactgctttttctctttttaagactgatgaggatattactggtcgtcttaaggatcgtattcagcctgagattcttgaggctcttcttaagcatatttcttttgataagtttgttcagatttctcttaaggctcttcgtcgtattgttcctcttatggagcagggtaagcgttatgatgaggcttgtgctgagatttatggtgatcattatggtaagaagaatactgaggagaagatttatcttcctcctattcctgctgatgagattcgtaatcctgttgttcttcgtgctctttctcaggctcgtaaggttattaatggtgttgttcgtcgttatggttctcctgctcgtattcatattgagactgctcgtgaggttggtaagtcttttaaggatcgtaaggagattgagaagcgtcaggaggagaatcgtaaggatcgtgagaaggctgctgctaagtttcgtgagtattttcctaattttgttggtgagcctaagtctaaggatattcttaagcttcgtctttatgagcagcagcatggtaagtgtctttattctggtaaggagattaatcttggtcgtcttaatgagaagggttatgttgagattgatgctgctcttcctttttctcgtacttgggatgattcttttaataataaggttcttgttcttggttctgagaatcagaataagggtaatcagactccttatgagtattttaatggtaaggataattctcgtgagtggcaggagtttaaggctcgtgttgagacttctcgttttcctcgttctaagaagcagcgtattcttcttcagaagtttgatgaggatggttttaaggagcgtaatcttaatgatactcgttatgttaatcgttttctttgtcagtttgttgctgatcgtatgcgtcttactggtaagggtaagaagcgtgtttttgcttctaatggtcagattactaatcttcttcgtggtttttggggtcttcgtaaggttcgtgctgagaatgatcgtcatcatgctcttgatgctgttgttgttgcttgttctactgttgctatgcagcagaagattactcgttttgttcgttataaggagatgaatgcttttgatggtaagactattgataaggagactggtgaggttcttcatcagaagactcattttcctcagccttgggagttttttgctcaggaggttatgattcgtgtttttggtaagcctgatggtaagcctgagtttgaggaggctgatactcctgagaagcttcgtactcttcttgctgagaagctttcttctcgtcctgaggctgttcatgagtatgttactcctctttttgtttctcgtgctcctaatcgtaagatgtctggtcagggtcatatggagactgttaagtctgctaagcgtcttgatgagggtgtttctgttcttcgtgttcctcttactcagcttaagcttaaggatcttgagaagatggttaatcgtgagcgtgagcctaagctttatgaggctcttaaggctcgtcttgaggctcataaggatgatcctgctaaggcttttgctgagcctttttataagtatgataaggctggtaatcgtactcagcaggttaaggctgttcgtgttgagcaggttcagaagactggtgtttgggttcgtaatcataatggtattgctgataatgctactatggttcgtgttgatgtttttgagaagggtgataagtattatcttgttcctatttattcttggcaggttgctaagggtattcttcctgatcgtgctgttgttgcttatgctgatgaggaggattggactgttattgatgagtcttttcgttttaagtttgttctttattctaatgatcttattaaggttcagcttaagaaggattcttttcttggttatttttctggtcttgatcgtgctactggtgctatttctcttcgtgagcatgatcttgagaagtctaagggtaaggatggtatgcatcgtattggtgttaagactgctctttcttttcagaagtatcagattgatgagatgggtaaggagattcgtccttgtcgtcttaagaagcgtcctcctgttcgttga

SEQ ID NO: 288 - RNA, 3246 nt, synthetic construct
  modified_base 2: mod_base = OTHER; note = thymine
  modified_base 10..11: mod_base = OTHER; note = thymine
  modified_base 26: mod_base = OTHER; note = thymine
  modified_base 31: mod_base = OTHER; note = thymine
  modified_base 35: mod_base = OTHER; note = thymine
  modified_base 38: mod_base = OTHER; note = thymine
  modified_base 44: mod_base = OTHER; note = thymine
  modified_base 50: mod_base = OTHER; note = thymine
  modified_base 56: mod_base = OTHER; note = thymine
  modified_base 61: mod_base = OTHER; note = thymine
  modified_base 65: mod_base = OTHER; note = thymine
  modified_base 70: mod_base = OTHER; note = thymine
  modified_base 77: mod_base = OTHER; note = thymine
  modified_base 80: mod_base = OTHER; note = thymine
  modified_base 86: mod_base = OTHER; note = thymine
  modified_base 107: mod_base = OTHER; note = thymine
  modified_base 113: mod_base = OTHER; note = thymine
  modified_base 116: mod_base = OTHER; note = thymine
  modified_base 122: mod_base = OTHER; note = thymine
  modified_base 128: mod_base = OTHER; note = thymine
  modified_base 134: mod_base = OTHER; note = thymine
  modified_base 136..137: mod_base = OTHER; note = thymine
  modified_base 152: mod_base = OTHER; note = thymine
  modified_base 169: mod_base = OTHER; note = thymine
  modified_base 173: mod_base = OTHER; note = thymine
  modified_base 179: mod_base = OTHER; note = thymine
  modified_base 191: mod_base = OTHER; note = thymine
  modified_base 199: mod_base = OTHER; note = thymine
  modified_base 203: mod_base = OTHER; note = thymine
  modified_base 212: mod_base = OTHER; note = thymine
  modified_base 236: mod_base = OTHER; note = thymine
  modified_base 239: mod_base = OTHER; note = thymine
  modified_base 254: mod_base = OTHER; note = thymine
  modified_base 257: mod_base = OTHER; note = thymine
  modified_base 272: mod_base = OTHER; note = thymine
  modified_base 275: mod_base = OTHER; note = thymine
  modified_base 289..290: mod_base = OTHER; note = thymine
  modified_base 305: mod_base = OTHER; note = thymine
  modified_base 308: mod_base = OTHER; note = thymine
  modified_base 313: mod_base = OTHER; note = thymine
  modified_base 317: mod_base = OTHER; note = thymine
  modified_base 331: mod_base = OTHER; note = thymine
  modified_base 338: mod_base = OTHER; note = thymine
  modified_base 353: mod_base = OTHER; note = thymine
  modified_base 365: mod_base = OTHER; note = thymine
  modified_base 374: mod_base = OTHER; note = thymine
  modified_base 379: mod_base = OTHER; note = thymine
  modified_base 382: mod_base = OTHER; note = thymine
  modified_base 389: mod_base = OTHER; note = thymine
  modified_base 392: mod_base = OTHER; note = thymine
  modified_base 395: mod_base = OTHER; note = thymine
  modified_base 401: mod_base = OTHER; note = thymine
  modified_base 404: mod_base = OTHER; note = thymine
  modified_base 418: mod_base = OTHER; note = thymine
  modified_base 422: mod_base = OTHER; note = thymine
  modified_base 424: mod_base = OTHER; note = thymine
  modified_base 464: mod_base = OTHER; note = thymine
  modified_base 473: mod_base = OTHER; note = thymine
  modified_base 476: mod_base = OTHER; note = thymine
  modified_base 485: mod_base = OTHER; note = thymine
  modified_base 506: mod_base = OTHER; note = thymine
  modified_base 520..521: mod_base = OTHER; note = thymine
  modified_base 539: mod_base = OTHER; note = thymine
  modified_base 545: mod_base = OTHER; note = thymine
  modified_base 553..554: mod_base = OTHER; note = thymine
  modified_base 565: mod_base = OTHER; note = thymine
  modified_base 575: mod_base = OTHER; note = thymine
  modified_base 595: mod_base = OTHER; note = thymine
  modified_base 598: mod_base = OTHER; note = thymine
  modified_base 607..608: mod_base = OTHER; note = thymine
  modified_base 610: mod_base = OTHER; note = thymine
  modified_base 623: mod_base = OTHER; note = thymine
  modified_base 635: mod_base = OTHER; note = thymine
  modified_base 641: mod_base = OTHER; note = thymine
  modified_base 644: mod_base = OTHER; note = thymine
  modified_base 646..647: mod_base = OTHER; note = thymine
  modified_base 664..665: mod_base = OTHER; note = thymine
  modified_base 680: mod_base = OTHER; note = thymine
  modified_base 682: mod_base = OTHER; note = thymine
  modified_base 692: mod_base = OTHER; note = thymine
  modified_base 704: mod_base = OTHER; note = thymine
  modified_base 713: mod_base = OTHER; note = thymine
  modified_base 716: mod_base = OTHER; note = thymine
  modified_base 719: mod_base = OTHER; note = thymine
  modified_base 737: mod_base = OTHER; note = thymine
  modified_base 739: mod_base = OTHER; note = thymine
  modified_base 752: mod_base = OTHER; note = thymine
  modified_base 761: mod_base = OTHER; note = thymine
  modified_base 764: mod_base = OTHER; note = thymine
  modified_base 772: mod_base = OTHER; note = thymine
  modified_base 778..779: mod_base = OTHER; note = thymine
  modified_base 814: mod_base = OTHER; note = thymine
  modified_base 829..830: mod_base = OTHER; note = thymine
  modified_base 833: mod_base = OTHER; note = thymine
  modified_base 835: mod_base = OTHER; note = thymine
  modified_base 839: mod_base = OTHER; note = thymine
  modified_base 848: mod_base = OTHER; note = thymine
  modified_base 857: mod_base = OTHER; note = thymine
  modified_base 863: mod_base = OTHER; note = thymine
  modified_base 866: mod_base = OTHER; note = thymine
  modified_base 877: mod_base = OTHER; note = thymine
  modified_base 890: mod_base = OTHER; note = thymine
  modified_base 914: mod_base = OTHER; note = thymine
  modified_base 917: mod_base = OTHER; note = thymine
  modified_base 928: mod_base = OTHER; note = thymine
  modified_base 937: mod_base = OTHER; note = thymine
  modified_base 944: mod_base = OTHER; note = thymine
  modified_base 949: mod_base = OTHER; note = thymine
  modified_base 968: mod_base = OTHER; note = thymine
  modified_base 971: mod_base = OTHER; note = thymine
  modified_base 973: mod_base = OTHER; note = thymine
  modified_base 977: mod_base = OTHER; note = thymine
  modified_base 991..992: mod_base = OTHER; note = thymine
  modified_base 994..995: mod_base = OTHER; note = thymine
  modified_base 1004: mod_base = OTHER; note = thymine
  modified_base 1009: mod_base = OTHER; note = thymine
  modified_base 1033: mod_base = OTHER; note = thymine
  modified_base 1040: mod_base = OTHER; note = thymine
  modified_base 1043: mod_base = OTHER; note = thymine
  modified_base 1049: mod_base = OTHER; note = thymine
  modified_base 1057: mod_base = OTHER; note = thymine
  modified_base 1067: mod_base = OTHER; note = thymine
  modified_base 1069: mod_base = OTHER; note = thymine
  modified_base 1079: mod_base = OTHER; note = thymine
  modified_base 1094: mod_base = OTHER; note = thymine
  modified_base 1108: mod_base = OTHER; note = thymine
  modified_base 1115: mod_base = OTHER; note = thymine
  modified_base 1121: mod_base = OTHER; note = thymine
  modified_base 1123: mod_base = OTHER; note = thymine
  modified_base 1133: mod_base = OTHER; note = thymine
  modified_base 1145: mod_base = OTHER; note = thymine
  modified_base 1156..1157: mod_base = OTHER; note = thymine
  modified_base 1159: mod_base = OTHER; note = thymine
  modified_base 1163: mod_base = OTHER; note = thymine
  modified_base 1165..1166: mod_base = OTHER; note = thymine
  modified_base 1184: mod_base = OTHER; note = thymine
  modified_base 1196: mod_base = OTHER; note = thymine
  modified_base 1208: mod_base = OTHER; note = thymine
  modified_base 1220: mod_base = OTHER; note = thymine
  modified_base 1223: mod_base = OTHER; note = thymine
  modified_base 1232: mod_base = OTHER; note = thymine
  modified_base 1235: mod_base = OTHER; note = thymine
  modified_base 1244: mod_base = OTHER; note = thymine
  modified_base 1246: mod_base = OTHER; note = thymine
  modified_base 1249..1250: mod_base = OTHER; note = thymine
  modified_base 1258..1259: mod_base = OTHER; note = thymine
  modified_base 1262: mod_base = OTHER; note = thymine
  modified_base 1268: mod_base = OTHER; note = thymine
  modified_base 1270: mod_base = OTHER; note = thymine
  modified_base 1274: mod_base = OTHER; note = thymine
  modified_base 1283: mod_base = OTHER; note = thymine
  modified_base 1292: mod_base = OTHER; note = thymine
  modified_base 1295: mod_base = OTHER; note = thymine
  modified_base 1301: mod_base = OTHER; note = thymine
  modified_base 1304: mod_base = OTHER; note = thymine
  modified_base 1321: mod_base = OTHER; note = thymine
  modified_base 1333: mod_base = OTHER; note = thymine
  modified_base 1343: mod_base = OTHER; note = thymine
  modified_base 1345: mod_base = OTHER; note = thymine
  modified_base 1357: mod_base = OTHER; note = thymine
  modified_base 1385: mod_base = OTHER; note = thymine
  modified_base 1387: mod_base = OTHER; note = thymine
  modified_base 1391: mod_base = OTHER; note = thymine
  modified_base 1400: mod_base = OTHER; note = thymine
  modified_base 1415: mod_base = OTHER; note = thymine
  modified_base 1427: mod_base = OTHER; note = thymine
  modified_base 1430: mod_base = OTHER; note = thymine
  modified_base 1433: mod_base = OTHER; note = thymine
  modified_base 1442: mod_base = OTHER; note = thymine
  modified_base 1444: mod_base = OTHER; note = thymine
  modified_base 1460: mod_base = OTHER; note = thymine
  modified_base 1463: mod_base = OTHER; note = thymine
  modified_base 1472: mod_base = OTHER; note = thymine
  modified_base 1475: mod_base = OTHER; note = thymine
  modified_base 1483: mod_base = OTHER; note = thymine
  modified_base 1489: mod_base = OTHER; note = thymine
  modified_base 1502: mod_base = OTHER; note = thymine
  modified_base 1508: mod_base = OTHER; note = thymine
  modified_base 1526: mod_base = OTHER; note = thymine
  modified_base 1534: mod_base = OTHER; note = thymine
  modified_base 1537..1538: mod_base = OTHER; note = thymine
  modified_base 1556: mod_base = OTHER; note = thymine
  modified_base 1609..1610: mod_base = OTHER; note = thymine
  modified_base 1618: mod_base = OTHER; note = thymine
  modified_base 1621..1622: mod_base = OTHER; note = thymine
  modified_base 1630..1631: mod_base = OTHER; note = thymine
  modified_base 1634: mod_base = OTHER; note = thymine
  modified_base 1648: mod_base = OTHER; note = thymine
  modified_base 1658: mod_base = OTHER; note = thymine
  modified_base 1661: mod_base = OTHER; note = thymine
  modified_base 1667: mod_base = OTHER; note = thymine
  modified_base 1673: mod_base = OTHER; note = thymine
  modified_base 1675: mod_base = OTHER; note = thymine
  modified_base 1696: mod_base = OTHER; note = thymine
  modified_base 1700: mod_base = OTHER; note = thymine
  modified_base 1702: mod_base = OTHER; note = thymine
  modified_base 1705: mod_base = OTHER; note = thymine
  modified_base 1718: mod_base = OTHER; note = thymine
  modified_base 1724: mod_base = OTHER; note = thymine
  modified_base 1733: mod_base = OTHER; note = thymine
  modified_base 1747: mod_base = OTHER; note = thymine
  modified_base 1751: mod_base = OTHER; note = thymine
  modified_base 1757: mod_base = OTHER; note = thymine
  modified_base 1769: mod_base = OTHER; note = thymine
  modified_base 1774..1775: mod_base = OTHER; note = thymine
  modified_base 1777: mod_base = OTHER; note = thymine
  modified_base 1786: mod_base = OTHER; note = thymine
  modified_base 1795: mod_base = OTHER; note = thymine
  modified_base 1798..1799: mod_base = OTHER; note = thymine
  modified_base 1811: mod_base = OTHER; note = thymine
  modified_base 1814: mod_base = OTHER; note = thymine
  modified_base 1817: mod_base = OTHER; note = thymine
  modified_base 1820: mod_base = OTHER; note = thymine
  modified_base 1825: mod_base = OTHER; note = thymine
  modified_base 1858: mod_base = OTHER; note = thymine
  modified_base 1864: mod_base = OTHER; note = thymine
  modified_base 1867..1868: mod_base = OTHER; note = thymine
  modified_base 1885: mod_base = OTHER; note = thymine
  modified_base 1894: mod_base = OTHER; note = thymine
  modified_base 1903..1904: mod_base = OTHER; note = thymine
  modified_base 1916: mod_base = OTHER; note = thymine
  modified_base 1924: mod_base = OTHER; note = thymine
  modified_base 1930..1931: mod_base = OTHER; note = thymine
  modified_base 1939: mod_base = OTHER; note = thymine
  modified_base 1955: mod_base = OTHER; note = thymine
  modified_base 1958: mod_base = OTHER; note = thymine
  modified_base 1961: mod_base = OTHER; note = thymine
  modified_base 1969..1970: mod_base = OTHER; note = thymine
  modified_base 1984..1985: mod_base = OTHER; note = thymine
  modified_base 2000: mod_base = OTHER; note = thymine
  modified_base 2014: mod_base = OTHER; note = thymine
  modified_base 2018: mod_base = OTHER; note = thymine
  modified_base 2026..2027: mod_base = OTHER; note = thymine
  modified_base 2030: mod_base = OTHER; note = thymine
  modified_base 2032: mod_base = OTHER; note = thymine
  modified_base 2038..2039: mod_base = OTHER; note = thymine
  modified_base 2042: mod_base = OTHER; note = thymine
  modified_base 2054: mod_base = OTHER; note = thymine
  modified_base 2060: mod_base = OTHER; note = thymine
  modified_base 2084: mod_base = OTHER; note = thymine
  modified_base 2086..2087: mod_base = OTHER; note = thymine
  modified_base 2092: mod_base = OTHER; note = thymine
  modified_base 2105: mod_base = OTHER; note = thymine
  modified_base 2114: mod_base = OTHER; note = thymine
  modified_base 2117: mod_base = OTHER; note = thymine
  modified_base 2125..2126: mod_base = OTHER; note = thymine
  modified_base 2128: mod_base = OTHER; note = thymine
  modified_base 2135: mod_base = OTHER; note = thymine
  modified_base 2144: mod_base = OTHER; note = thymine
  modified_base 2174: mod_base = OTHER; note = thymine
  modified_base 2183: mod_base = OTHER; note = thymine
  modified_base 2186: mod_base = OTHER; note = thymine
  modified_base 2189: mod_base = OTHER; note = thymine
  modified_base 2194: mod_base = OTHER; note = thymine
  modified_base 2197: mod_base = OTHER; note = thymine
  modified_base 2204: mod_base = OTHER; note = thymine
  modified_base 2210: mod_base = OTHER; note = thymine
  modified_base 2222: mod_base = OTHER; note = thymine
  modified_base 2230..2231: mod_base = OTHER; note = thymine
  modified_base 2234: mod_base = OTHER; note = thymine
  modified_base 2239: mod_base = OTHER; note = thymine
  modified_base 2249: mod_base = OTHER; note = thymine
  modified_base 2257..2258: mod_base = OTHER; note = thymine
  modified_base 2273: mod_base = OTHER; note = thymine
  modified_base 2294: mod_base = OTHER; note = thymine
  modified_base 2297: mod_base = OTHER; note = thymine
  modified_base 2314..2315: mod_base = OTHER; note = thymine
  modified_base 2326: mod_base = OTHER; note = thymine
  modified_base 2332..2333: mod_base = OTHER; note = thymine
  modified_base 2335..2336: mod_base = OTHER; note = thymine
  modified_base 2348: mod_base = OTHER; note = thymine
  modified_base 2351: mod_base = OTHER; note = thymine
  modified_base 2354: mod_base = OTHER; note = thymine
  modified_base 2360: mod_base = OTHER; note = thymine
  modified_base 2362..2363: mod_base = OTHER; note = thymine
  modified_base 2389..2390: mod_base = OTHER; note = thymine
  modified_base 2417: mod_base = OTHER; note = thymine
  modified_base 2426: mod_base = OTHER; note = thymine
  modified_base 2429: mod_base = OTHER; note = thymine
  modified_base 2441: mod_base = OTHER; note = thymine
  modified_base 2443: mod_base = OTHER; note = thymine
  modified_base 2446: mod_base = OTHER; note = thymine
  modified_base 2462: mod_base = OTHER; note = thymine
  modified_base 2470: mod_base = OTHER; note = thymine
  modified_base 2474: mod_base = OTHER; note = thymine
  modified_base 2483: mod_base = OTHER; note = thymine
  modified_base 2485..2486: mod_base = OTHER; note = thymine
  modified_base 2489: mod_base = OTHER; note = thymine
  modified_base 2491: mod_base = OTHER; note = thymine
  modified_base 2513: mod_base = OTHER; note = thymine
  modified_base 2515: mod_base = OTHER; note = thymine
  modified_base 2531: mod_base = OTHER; note = thymine
  modified_base 2540: mod_base = OTHER; note = thymine
  modified_base 2545: mod_base = OTHER; note = thymine
  modified_base 2558: mod_base = OTHER; note = thymine
  modified_base 2570: mod_base = OTHER; note = thymine
  modified_base 2572: mod_base = OTHER; note = thymine
  modified_base 2576: mod_base = OTHER; note = thymine
  modified_base 2579: mod_base = OTHER; note = thymine
  modified_base 2585: mod_base = OTHER; note = thymine
  modified_base 2591: mod_base = OTHER; note = thymine
  modified_base 2600: mod_base = OTHER; note = thymine
  modified_base 2606: mod_base = OTHER; note = thymine
  modified_base 2615: mod_base = OTHER; note = thymine
  modified_base 2624: mod_base = OTHER; note = thymine
  modified_base 2627: mod_base = OTHER; note = thymine
  modified_base 2651: mod_base = OTHER; note = thymine
  modified_base 2653: mod_base = OTHER; note = thymine
  modified_base 2663: mod_base = OTHER; note = thymine
  modified_base 2675: mod_base = OTHER; note = thymine
  modified_base 2707..2708: mod_base = OTHER; note = thymine
  modified_base 2719..2720: mod_base = OTHER; note = thymine
  modified_base 2722: mod_base = OTHER; note = thymine
  modified_base 2728: mod_base = OTHER; note = thymine
  modified_base 2759: mod_base = OTHER; note = thymine
  modified_base 2768: mod_base = OTHER; note = thymine
  modified_base 2774: mod_base = OTHER; note = thymine
  modified_base 2783: mod_base = OTHER; note = thymine
  modified_base 2798: mod_base = OTHER; note = thymine
  modified_base 2800: mod_base = OTHER; note = thymine
  modified_base 2804: mod_base = OTHER; note = thymine
  modified_base 2822: mod_base = OTHER; note = thymine
  modified_base 2840: mod_base = OTHER; note = thymine
  modified_base 2843: mod_base = OTHER; note = thymine
  modified_base 2849: mod_base = OTHER; note = thymine
  modified_base 2855: mod_base = OTHER; note = thymine
  modified_base 2857..2858: mod_base = OTHER; note = thymine
  modified_base 2875: mod_base = OTHER; note = thymine
  modified_base 2878: mod_base = OTHER; note = thymine
  modified_base 2882: mod_base = OTHER; note = thymine
  modified_base 2885: mod_base = OTHER; note = thymine
  modified_base 2891: mod_base = OTHER; note = thymine
  modified_base 2893: mod_base = OTHER; note = thymine
  modified_base 2896: mod_base = OTHER; note = thymine
  modified_base 2899: mod_base = OTHER; note = thymine
  modified_base 2906: mod_base = OTHER; note = thymine
  modified_base 2918: mod_base = OTHER; note = thymine
  modified_base 2921: mod_base = OTHER; note = thymine
  modified_base 2936: mod_base = OTHER; note = thymine
  modified_base 2939: mod_base = OTHER; note = thymine
  modified_base 2944: mod_base = OTHER; note = thymine
  modified_base 2962: mod_base = OTHER; note = thymine
  modified_base 2969: mod_base = OTHER; note = thymine
  modified_base 2972: mod_base = OTHER; note = thymine
  modified_base 2980: mod_base = OTHER; note = thymine
  modified_base 2983..2984: mod_base = OTHER; note = thymine
  modified_base 2989..2990: mod_base = OTHER; note = thymine
  modified_base 2995..2996: mod_base = OTHER; note = thymine
  modified_base 2999: mod_base = OTHER; note = thymine
  modified_base 3002: mod_base = OTHER; note = thymine
  modified_base 3004: mod_base = OTHER; note = thymine
  modified_base 3007: mod_base = OTHER; note = thymine
  modified_base 3017: mod_base = OTHER; note = thymine
  modified_base 3020: mod_base = OTHER; note = thymine
  modified_base 3026: mod_base = OTHER; note = thymine
  modified_base 3032: mod_base = OTHER; note = thymine
  modified_base 3043: mod_base = OTHER; note = thymine
  modified_base 3046..3047: mod_base = OTHER; note = thymine
  modified_base 3050: mod_base = OTHER; note = thymine
  modified_base 3055: mod_base = OTHER; note = thymine
  modified_base 3058..3059: mod_base = OTHER; note = thymine
  modified_base 3061: mod_base = OTHER; note = thymine
  modified_base 3068: mod_base = OTHER; note = thymine
  modified_base 3089: mod_base = OTHER; note = thymine
  modified_base 3091: mod_base = OTHER; note = thymine
  modified_base 3095: mod_base = OTHER; note = thymine
  modified_base 3110: mod_base = OTHER; note = thymine
  modified_base 3118: mod_base = OTHER; note = thymine
  modified_base 3137: mod_base = OTHER; note = thymine
  modified_base 3146: mod_base = OTHER; note = thymine
  modified_base 3152: mod_base = OTHER; note = thymine
  modified_base 3164: mod_base = OTHER; note = thymine
  modified_base 3166: mod_base = OTHER; note = thymine
  modified_base 3169..3170: mod_base = OTHER; note = thymine
  modified_base 3178: mod_base = OTHER; note = thymine
  modified_base 3185: mod_base = OTHER; note = thymine
  modified_base 3194: mod_base = OTHER; note = thymine
  modified_base 3206: mod_base = OTHER; note = thymine
  modified_base 3214: mod_base = OTHER; note = thymine
  modified_base 3221: mod_base = OTHER; note = thymine
  modified_base 3239: mod_base = OTHER; note = thymine
  misc_feature 1..3246: note = Synthetic
  source 1..3246: mol_type = other RNA
atggccgccttcaagcccaaccccatcaactacatcctgggcctggccatcggcatcgcctccgtgggctgggccatggtggagatcgacgaggaggagaaccccatccggctgatcgacctgggcgtgcgggtgttcgagcgggccgaggtgcccaagaccggcgactccctggccatggcccggcggctggcccggtccgtgcggcggctgacccggcggcgggcccaccggctgctgcgggcccggcggctgctgaagcgggagggcgtgctgcaggccgccgacttcgacgagaacggcctgatcaagtccctgcccaacaccccctggcagctgcgggccgccgccctggaccggaagctgacccccctggagtggtccgccgtgctgctgcacctgatcaagcaccggggctacctgtcccagcggaagaacgagggcgagaccgccgacaaggagctgggcgccctgctgaagggcgtggccgacaacgcccacgccctgcagaccggcgacttccggacccccgccgagctggccctgaacaagttcgagaaggagtgcggccacatccggaaccagcggggcgactactcccacaccttctcccggaaggacctgcaggccgagctgaacctgctgttcgagaagcagaaggagttcggcaacccccacgtgtccggcggcctgaaggagggcatcgagaccctgctgatgacccagcggcccgccctgtccggcgacgccgtgcagaagatgctgggccactgcaccttcgagcccgccgagcccaaggccgccaagaacacctacaccgccgagcggttcatctggctgaccaagctgaacaacctgcggatcctggagcagggctccgagcggcccctgaccgacaccgagcgggccaccctgatggacgagccctaccggaagtccaagctgacctacgcccaggcccggaagctgctgtccctggaggacaccgccttcttcaagggcctgcggtacggcaaggacaacgccgaggcctccaccctgatggagatgaaggcctaccacaccatctcccgggccctggagaaggagggcctgaaggacaagaagtcccccctgaacctgtcccccgagctgcaggacgagatcggcaccgccttctccctgttcaagaccgacgaggacatcaccggccggctgaaggaccggatccagcccgagatcctggaggccctgctgaagcacatctccttcgacaagttcgtgcagatctccctgaaggccctgcggcggatcgtgcccctgatggagcagggcaagcggtacgacgaggcctgcgccgagatctacggcgaccactacggcaagaagaacaccgaggagaagatctacctgccccccatccccgccgacgagatccggaaccccgtggtgctgcgggccctgtcccaggcccggaaggtgatcaacggcgtggtgcggcggtacggctcccccgcccggatccacatcgagaccgcccgggaggtgggcaagtccttcaaggaccggaaggagatcgagaagcggcaggaggagaaccggaaggaccgggagaaggccgccgccaagttccgggagtacttccccaacttcgtgggcgagcccaagtccaaggacatcctgaagctgcggctgtacgagcagcagcacggcaagtgcctgtactccggcaaggagatcaacctgggccggctgaacgagaagggctacgtggagatcgacgccgccctgcccttctcccggacctgggacgactccttcaacaacaaggtgctggtgctgggctccgagaaccagaacaagggcaaccagaccccctacgagtacttcaacggcaaggacaactcccgggagtggcaggagttcaaggcccgggtggagacctcccggttcccccggtccaagaagcagcggatcctgctgcagaagttcgacgaggacggcttcaaggagcggaacctgaacgacacccggtacgtgaaccggttcctgtgccagttcgtggccgaccggatgcggctgaccggcaagggcaagaagcgggtgttcgcctccaacggccagatcaccaacctgctgcggggcttctggggcctgcggaaggtgcgggccgagaacgaccggcaccacgccctggacgccgtggtggtggcctgctccaccgtggccatgcagcagaagatcacccggttcgtgcggtacaaggagatgaacgccttcgacggcaagaccatcgacaaggagaccggcgaggtgctgcaccagaagacccacttcccccagccctgggagttcttcgcccaggaggtgatgatccgggtgttcggcaagcccgacggcaagcccgagttcgaggaggccgacacccccgagaagctgcggaccctgctggccgagaagctgtcctcccggcccgaggccgtgcacgagtacgtgacccccctgttcgtgtcccgggcccccaaccggaagatgtccggccagggccacatggagaccgtgaagtccgccaagcggctggacgagggcgtgtccgtgctgcgggtgcccctgacccagctgaagctgaaggacctggagaagatggtgaaccgggagcgggagcccaagctgtacgaggccctgaaggcccggctggaggcccacaaggacgaccccgccaaggccttcgccgagcccttctacaagtacgacaaggccggcaaccggacccagcaggtgaaggccgtgcgggtggagcaggtgcagaagaccggcgtgtgggtgcggaaccacaacggcatcgccgacaacgccaccatggtgcgggtggacgtgttcgagaagggcgacaagtactacctggtgcccatctactcctggcaggtggccaagggcatcctgcccgaccgggccgtggtggcctacgccgacgaggaggactggaccgtgatcgacgagtccttccggttcaagttcgtgctgtactccaacgacctgatcaaggtgcagctgaagaaggactccttcctgggctacttctccggcctggaccgggccaccggcgccatctccctgcgggagcacgacctggagaagtccaagggcaaggacggcatgcaccggatcggcgtgaagaccgccctgtccttccagaagtaccagatcgacgagatgggcaaggagatccggccctgccggctgaagaagcggccccccgtgcggtga

SEQ ID NO: 289 - RNA, 3246 nt, synthetic construct
  modified_base 2: mod_base = OTHER; note = thymine
  modified_base 10..11: mod_base = OTHER; note = thymine
  modified_base 26: mod_base = OTHER; note = thymine
  modified_base 31: mod_base = OTHER; note = thymine
  modified_base 35: mod_base = OTHER; note = thymine
  modified_base 38: mod_base = OTHER; note = thymine
  modified_base 44: mod_base = OTHER; note = thymine
  modified_base 50: mod_base = OTHER; note = thymine
  modified_base 56: mod_base = OTHER; note = thymine
  modified_base 61: mod_base = OTHER; note = thymine
  modified_base 65: mod_base = OTHER; note = thymine
  modified_base 70: mod_base = OTHER; note = thymine
  modified_base 77: mod_base = OTHER; note = thymine
  modified_base 80: mod_base = OTHER; note = thymine
  modified_base 86: mod_base = OTHER; note = thymine
  modified_base 107: mod_base = OTHER; note = thymine
  modified_base 113: mod_base = OTHER; note = thymine
  modified_base 116: mod_base = OTHER; note = thymine
  modified_base 122: mod_base = OTHER; note = thymine
  modified_base 128: mod_base = OTHER; note = thymine
  modified_base 134: mod_base = OTHER; note = thymine
  modified_base 136..137: mod_base = OTHER; note = thymine
  modified_base 152: mod_base = OTHER; note = thymine
  modified_base 169: mod_base = OTHER; note = thymine
  modified_base 173: mod_base = OTHER; note = thymine
  modified_base 179: mod_base = OTHER; note = thymine
  modified_base 191: mod_base = OTHER; note = thymine
  modified_base 199: mod_base = OTHER; note = thymine
  modified_base 203: mod_base = OTHER; note = thymine
  modified_base 212: mod_base = OTHER; note = thymine
  modified_base 236: mod_base = OTHER; note = thymine
  modified_base 239: mod_base = OTHER; note = thymine
  modified_base 254: mod_base = OTHER; note = thymine
  modified_base 257: mod_base = OTHER; note = thymine
  modified_base 272: mod_base = OTHER; note = thymine
  modified_base 275: mod_base = OTHER; note = thymine
  modified_base 289..290: mod_base = OTHER; note = thymine
  modified_base 305: mod_base = OTHER; note = thymine
  modified_base 308: mod_base = OTHER; note = thymine
  modified_base 313: mod_base = OTHER; note = thymine
  modified_base 317: mod_base = OTHER; note = thymine
  modified_base 331: mod_base = OTHER; note = thymine
  modified_base 338: mod_base = OTHER; note = thymine
  modified_base 353: mod_base = OTHER; note = thymine
  modified_base 365: mod_base = OTHER; note = thymine
  modified_base 374: mod_base = OTHER; note = thymine
  modified_base 379: mod_base = OTHER; note = thymine
  modified_base 382: mod_base = OTHER; note = thymine
  modified_base 389: mod_base = OTHER; note = thymine
  modified_base 392: mod_base = OTHER; note = thymine
  modified_base 395: mod_base = OTHER; note = thymine
  modified_base 401: mod_base = OTHER; note = thymine
  modified_base 404: mod_base = OTHER; note = thymine
  modified_base 418: mod_base = OTHER; note = thymine
  modified_base 422: mod_base = OTHER; note = thymine
  modified_base 424: mod_base = OTHER; note = thymine
  modified_base 464: mod_base = OTHER; note = thymine
  modified_base 473: mod_base = OTHER; note = thymine
  modified_base 476: mod_base = OTHER; note = thymine
  modified_base 485: mod_base = OTHER; note = thymine
  modified_base 506: mod_base = OTHER; note = thymine
  modified_base 520..521: mod_base = OTHER; note = thymine
  modified_base 539: mod_base = OTHER; note = thymine
  modified_base 545: mod_base = OTHER; note = thymine
  modified_base 553..554: mod_base = OTHER; note = thymine
  modified_base 565: mod_base = OTHER; note = thymine
  modified_base 575: mod_base = OTHER; note = thymine
  modified_base 595: mod_base = OTHER; note = thymine
  modified_base 598: mod_base = OTHER; note = thymine
  modified_base 607..608: mod_base = OTHER; note = thymine
  modified_base 610: mod_base = OTHER; note = thymine
  modified_base 623: mod_base = OTHER; note = thymine
  modified_base 635: mod_base = OTHER; note = thymine
  modified_base 641: mod_base = OTHER; note = thymine
  modified_base 644: mod_base = OTHER; note = thymine
  modified_base 646..647: mod_base = OTHER; note = thymine
  modified_base 664..665: mod_base = OTHER; note = thymine
  modified_base 680: mod_base = OTHER; note = thymine
  modified_base 682: mod_base = OTHER; note = thymine
  modified_base 692: mod_base = OTHER; note = thymine
  modified_base 704: mod_base = OTHER; note = thymine
  modified_base 713: mod_base = OTHER; note = thymine
  modified_base 716: mod_base = OTHER; note = thymine
  modified_base 719: mod_base = OTHER; note = thymine
  modified_base 737: mod_base = OTHER; note = thymine
  modified_base 739: mod_base = OTHER; note = thymine
  modified_base 752: mod_base = OTHER; note = thymine
  modified_base 761: mod_base = OTHER; note = thymine
  modified_base 764: mod_base = OTHER; note = thymine
  modified_base 772: mod_base = OTHER; note = thymine
  modified_base 778..779: mod_base = OTHER; note = thymine
  modified_base 814: mod_base = OTHER; note = thymine
  modified_base 829..830: mod_base = OTHER; note = thymine
  modified_base 833: mod_base = OTHER; note = thymine
  modified_base 835: mod_base = OTHER; note = thymine
  modified_base 839: mod_base = OTHER; note = thymine
  modified_base 848: mod_base = OTHER; note = thymine
  modified_base 857: mod_base = OTHER; note = thymine
  modified_base 863: mod_base = OTHER; note = thymine
  modified_base 866: mod_base = OTHER; note = thymine
  modified_base 877: mod_base = OTHER; note = thymine
  modified_base 890: mod_base = OTHER; note = thymine
  modified_base 914: mod_base = OTHER; note = thymine
  modified_base 917: mod_base = OTHER; note = thymine
  modified_base 928: mod_base = OTHER; note = thymine
  modified_base 937: mod_base = OTHER; note = thymine
  modified_base 944: mod_base = OTHER; note = thymine
  modified_base 949: mod_base = OTHER; note = thymine
  modified_base 968: mod_base = OTHER; note = thymine
  modified_base 971: mod_base = OTHER; note = thymine
  modified_base 973: mod_base = OTHER; note = thymine
  modified_base 977: mod_base = OTHER; note = thymine
  modified_base 991..992: mod_base = OTHER; note = thymine
  modified_base 994..995: mod_base = OTHER; note = thymine
  modified_base 1004: mod_base = OTHER; note = thymine
  modified_base 1009: mod_base = OTHER; note = thymine
  modified_base 1033: mod_base = OTHER; note = thymine
  modified_base 1040: mod_base = OTHER; note = thymine
  modified_base 1043: mod_base = OTHER; note = thymine
  modified_base 1049: mod_base = OTHER; note = thymine
  modified_base 1057: mod_base = OTHER; note = thymine
  modified_base 1067: mod_base = OTHER; note = thymine
  modified_base 1069: mod_base = OTHER; note = thymine
  modified_base 1079: mod_base = OTHER; note = thymine
  modified_base 1094: mod_base = OTHER; note = thymine
  modified_base 1108: mod_base = OTHER; note = thymine
  modified_base 1115: mod_base = OTHER; note = thymine
  modified_base 1121: mod_base = OTHER; note = thymine
  modified_base 1123: mod_base = OTHER; note = thymine
  modified_base 1133: mod_base = OTHER; note = thymine
  modified_base 1145: mod_base = OTHER; note = thymine
  modified_base 1156..1157: mod_base = OTHER; note = thymine
  modified_base 1159: mod_base = OTHER; note = thymine
  modified_base 1163: mod_base = OTHER; note = thymine
  modified_base 1165..1166: mod_base = OTHER; note = thymine
  modified_base 1184: mod_base = OTHER; note = thymine
  modified_base 1196: mod_base = OTHER; note = thymine
  modified_base 1208: mod_base = OTHER; note = thymine
  modified_base 1220: mod_base = OTHER; note = thymine
  modified_base 1223: mod_base = OTHER; note = thymine
  modified_base 1232: mod_base = OTHER; note = thymine
  modified_base 1235: mod_base = OTHER; note = thymine
  modified_base 1244: mod_base = OTHER; note = thymine
  modified_base 1246: mod_base = OTHER; note = thymine
  modified_base 1249..1250: mod_base = OTHER; note = thymine
  modified_base 1258..1259: mod_base = OTHER; note = thymine
  modified_base 1262: mod_base = OTHER; note = thymine
  modified_base 1268: mod_base = OTHER; note = thymine
  modified_base 1270: mod_base = OTHER; note = thymine
  modified_base 1274: mod_base = OTHER; note = thymine
  modified_base 1283: mod_base = OTHER; note = thymine
  modified_base 1292: mod_base = OTHER; note = thymine
  modified_base 1295: mod_base = OTHER; note = thymine
  modified_base 1301: mod_base = OTHER; note = thymine
  modified_base 1304: mod_base = OTHER; note = thymine
  modified_base 1321: mod_base = OTHER; note = thymine
  modified_base 1333: mod_base = OTHER; note = thymine
  modified_base 1343: mod_base = OTHER; note = thymine
  modified_base 1345: mod_base = OTHER; note = thymine
  modified_base 1357: mod_base = OTHER; note = thymine
  modified_base 1385: mod_base = OTHER; note = thymine
  modified_base 1387: mod_base = OTHER; note = thymine
  modified_base 1391: mod_base = OTHER; note = thymine
  modified_base 1400: mod_base = OTHER; note = thymine
  modified_base 1415: mod_base = OTHER; note = thymine
  modified_base 1427: mod_base = OTHER; note = thymine
  modified_base 1430: mod_base = OTHER; note = thymine
  modified_base 1433: mod_base = OTHER; note = thymine
  modified_base 1442: mod_base = OTHER; note = thymine
  modified_base 1444: mod_base = OTHER; note = thymine
  modified_base 1460: mod_base = OTHER; note = thymine
  modified_base 1463: mod_base = OTHER; note = thymine
  modified_base 1472: mod_base = OTHER; note = thymine
  modified_base 1475: mod_base = OTHER; note = thymine
  modified_base 1483: mod_base = OTHER; note = thymine
  modified_base 1489: mod_base = OTHER; note = thymine
  modified_base 1502: mod_base = OTHER; note = thymine
  modified_base 1508: mod_base = OTHER; note = thymine
  modified_base 1526: mod_base = OTHER; note = thymine
  modified_base 1534: mod_base = OTHER; note = thymine
  modified_base 1537..1538: mod_base = OTHER; note = thymine
  modified_base 1556: mod_base = OTHER; note = thymine
  modified_base 1609..1610: mod_base = OTHER; note = thymine
  modified_base 1618: mod_base = OTHER; note = thymine
  modified_base 1621..1622: mod_base = OTHER; note = thymine
  modified_base 1630..1631: mod_base = OTHER; note = thymine
  modified_base 1634: mod_base = OTHER; note = thymine
  modified_base 1648: mod_base = OTHER; note = thymine
  modified_base 1658: mod_base = OTHER; note = thymine
  modified_base 1661: mod_base = OTHER; note = thymine
  modified_base 1667: mod_base = OTHER; note = thymine
  modified_base 1673: mod_base = OTHER; note = thymine
  modified_base 1675: mod_base = OTHER; note = thymine
  modified_base 1696: mod_base = OTHER; note = thymine
  modified_base 1700: mod_base = OTHER; note = thymine
  modified_base 1702: mod_base = OTHER; note = thymine
  modified_base 1705: mod_base = OTHER; note = thymine
  modified_base 1718: mod_base = OTHER; note = thymine
  modified_base 1724: mod_base = OTHER; note = thymine
  modified_base 1733: mod_base = OTHER; note = thymine
  modified_base 1747: mod_base = OTHER; note = thymine
  modified_base 1751: mod_base = OTHER; note = thymine
  modified_base 1757: mod_base = OTHER; note = thymine
  modified_base 1769: mod_base = OTHER; note = thymine
  modified_base 1774..1775: mod_base = OTHER; note = thymine
  modified_base 1777: mod_base = OTHER; note = thymine
  modified_base 1786: mod_base = OTHER; note = thymine
  modified_base 1795: mod_base = OTHER; note = thymine
  modified_base 1798..1799: mod_base = OTHER; note = thymine
  modified_base 1811: mod_base = OTHER; note = thymine
  modified_base 1814: mod_base = OTHER; note = thymine
  modified_base 1817: mod_base = OTHER; note = thymine
  modified_base 1820: mod_base = OTHER; note = thymine
  modified_base 1825: mod_base = OTHER; note = thymine
  modified_base 1858: mod_base = OTHER; note = thymine
  modified_base 1864: mod_base = OTHER; note = thymine
  modified_base 1867..1868: mod_base = OTHER; note = thymine
  modified_base 1885: mod_base = OTHER; note = thymine
  modified_base 1894: mod_base = OTHER; note = thymine
  modified_base 1903..1904: mod_base = OTHER; note = thymine
  modified_base 1916: mod_base = OTHER; note = thymine
  modified_base 1924: mod_base = OTHER; note = thymine
  modified_base 1930..1931: mod_base = OTHER; note = thymine
  modified_base 1939: mod_base = OTHER; note = thymine
  modified_base 1955: mod_base = OTHER; note = thymine
  modified_base 1958: mod_base = OTHER; note = thymine
  modified_base 1961: mod_base = OTHER; note = thymine
  modified_base 1969..1970: mod_base = OTHER; note = thymine
  modified_base 1984..1985: mod_base = OTHER; note = thymine
  modified_base 2000: mod_base = OTHER; note = thymine
  modified_base 2014: mod_base = OTHER; note = thymine
  modified_base 2018: mod_base = OTHER; note = thymine
  modified_base 2026..2027: mod_base = OTHER; note = thymine
  modified_base 2030: mod_base = OTHER; note = thymine
  modified_base 2032: mod_base = OTHER; note = thymine
  modified_base 2038..2039: mod_base = OTHER; note = thymine
  modified_base 2042: mod_base = OTHER; note = thymine
  modified_base 2054: mod_base = OTHER; note = thymine
  modified_base 2060: mod_base = OTHER; note = thymine
  modified_base 2084: mod_base = OTHER; note = thymine
  modified_base 2086..2087: mod_base = OTHER; note = thymine
  modified_base 2092: mod_base = OTHER; note = thymine
  modified_base 2105: mod_base = OTHER; note = thymine
  modified_base 2114: mod_base = OTHER; note = thymine
  modified_base 2117: mod_base = OTHER; note = thymine
  modified_base 2125..2126: mod_base = OTHER; note = thymine
  modified_base 2128: mod_base = OTHER; note = thymine
  modified_base 2135: mod_base = OTHER; note = thymine
  modified_base 2144: mod_base = OTHER; note = thymine
  modified_base 2174: mod_base = OTHER; note = thymine
  modified_base 2183: mod_base = OTHER; note = thymine
  modified_base 2186: mod_base = OTHER; note = thymine
  modified_base 2189: mod_base = OTHER; note = thymine
  modified_base 2194: mod_base = OTHER; note = thymine
  modified_base 2197: mod_base = OTHER; note = thymine
  modified_base 2204: mod_base = OTHER; note = thymine
  modified_base 2210: mod_base = OTHER; note = thymine
  modified_base 2222: mod_base = OTHER; note = thymine
  modified_base 2230..2231: mod_base = OTHER; note = thymine
  modified_base 2234: mod_base = OTHER; note = thymine
  modified_base 2239: mod_base = OTHER; note = thymine
  modified_base 2249: mod_base = OTHER; note = thymine
  modified_base 2257..2258: mod_base = OTHER; note = thymine
  modified_base 2273: mod_base = OTHER; note = thymine
  modified_base 2294: mod_base = OTHER; note = thymine
  modified_base 2297: mod_base = OTHER; note = thymine
  modified_base 2314..2315: mod_base = OTHER; note = thymine
  modified_base 2326: mod_base = OTHER; note = thymine
  modified_base 2332..2333: mod_base = OTHER; note = thymine
  modified_base 2335..2336: mod_base = OTHER; note = thymine
  modified_base 2348: mod_base = OTHER; note = thymine
  modified_base 2351: mod_base = OTHER; note = thymine
  modified_base 2354: mod_base = OTHER; note = thymine
  modified_base 2360: mod_base = OTHER; note = thymine
  modified_base 2362..2363: mod_base = OTHER; note = thymine
  modified_base 2389..2390: mod_base = OTHER; note = thymine
  modified_base 2417: mod_base = OTHER; note = thymine
  modified_base 2426: mod_base = OTHER; note = thymine
  modified_base 2429: mod_base = OTHER; note = thymine
  modified_base 2441: mod_base = OTHER; note = thymine
  modified_base 2443: mod_base = OTHER; note = thymine
  modified_base 2446: mod_base = OTHER; note = thymine
  modified_base 2462: mod_base = OTHER; note = thymine
  modified_base 2470: mod_base = OTHER; note = thymine
  modified_base 2474: mod_base = OTHER; note = thymine
  modified_base 2483: mod_base = OTHER; note = thymine
  modified_base 2485..2486: mod_base = OTHER; note = thymine
  modified_base 2489: mod_base = OTHER; note = thymine
  modified_base 2491: mod_base = OTHER; note = thymine
  modified_base 2513: mod_base = OTHER; note = thymine
  modified_base 2515: mod_base = OTHER; note = thymine
  modified_base 2531: mod_base = OTHER; note = thymine
  modified_base 2540: mod_base = OTHER; note = thymine
  modified_base 2545: mod_base = OTHER; note = thymine
  modified_base 2558: mod_base = OTHER; note = thymine
  modified_base 2570: mod_base = OTHER; note = thymine
  modified_base 2572: mod_base = OTHER; note = thymine
  modified_base 2576: mod_base = OTHER; note = thymine
  modified_base 2579: mod_base = OTHER; note = thymine
  modified_base 2585: mod_base = OTHER; note = thymine
  modified_base 2591: mod_base = OTHER; note = thymine
  modified_base 2600: mod_base = OTHER; note = thymine
  modified_base 2606: mod_base = OTHER; note = thymine
  modified_base 2615: mod_base = OTHER; note = thymine
  modified_base 2624: mod_base = OTHER; note = thymine
  modified_base 2627: mod_base = OTHER; note = thymine
  modified_base 2651: mod_base = OTHER; note = thymine
  modified_base 2653: mod_base = OTHER; note = thymine
  modified_base 2663: mod_base = OTHER; note = thymine
  modified_base 2675: mod_base = OTHER; note = thymine
  modified_base 2707..2708: mod_base = OTHER; note = thymine
  modified_base 2719..2720: mod_base = OTHER; note = thymine
  modified_base 2722: mod_base = OTHER; note = thymine
  modified_base 2728: mod_base = OTHER; note = thymine
  modified_base 2759: mod_base = OTHER; note = thymine
  modified_base 2768: mod_base = OTHER; note = thymine
  modified_base 2774: mod_base = OTHER; note = thymine
  modified_base 2783: mod_base = OTHER; note = thymine
  modified_base 2798: mod_base = OTHER; note = thymine
  modified_base 2800: mod_base = OTHER; note = thymine
  modified_base 2804: mod_base = OTHER; note = thymine
  modified_base 2822: mod_base = OTHER; note = thymine
  modified_base 2840: mod_base = OTHER; note = thymine
  modified_base 2843: mod_base = OTHER; note = thymine
  modified_base 2849: mod_base = OTHER; note = thymine
  modified_base 2855: mod_base = OTHER; note = thymine
  modified_base 2857..2858: mod_base = OTHER; note = thymine
  modified_base 2875: mod_base = OTHER; note = thymine
  modified_base 2878: mod_base = OTHER; note = thymine
  modified_base 2882: mod_base = OTHER; note = thymine
  modified_base 2885: mod_base = OTHER; note = thymine
  modified_base 2891: mod_base = OTHER; note = thymine
  modified_base 2893: mod_base = OTHER; note = thymine
  modified_base 2896: mod_base = OTHER; note = thymine
  modified_base 2899: mod_base = OTHER; note = thymine
  modified_base 2906: mod_base = OTHER; note = thymine
  modified_base 2918: mod_base = OTHER; note = thymine
  modified_base 2921: mod_base = OTHER; note = thymine
  modified_base 2936: mod_base = OTHER; note = thymine
  modified_base 2939: mod_base = OTHER; note = thymine
  modified_base 2944: mod_base = OTHER; note = thymine
  modified_base 2962: mod_base = OTHER; note = thymine
  modified_base 2969: mod_base = OTHER; note = thymine
  modified_base 2972: mod_base = OTHER; note = thymine
  modified_base 2980: mod_base = OTHER; note = thymine
  modified_base 2983..2984: mod_base = OTHER; note = thymine
  modified_base 2989..2990: mod_base = OTHER; note = thymine
  modified_base 2995..2996: mod_base = OTHER; note = thymine
  modified_base 2999: mod_base = OTHER; note = thymine
  modified_base 3002: mod_base = OTHER; note = thymine
  modified_base 3004: mod_base = OTHER; note = thymine
  modified_base 3007: mod_base = OTHER; note = thymine
  modified_base 3017: mod_base = OTHER; note = thymine
  modified_base 3020: mod_base = OTHER; note = thymine
  modified_base 3026: mod_base = OTHER; note = thymine
  modified_base 3032: mod_base = OTHER; note = thymine
  modified_base 3043: mod_base = OTHER; note = thymine
  modified_base 3046..3047: mod_base = OTHER; note = thymine
  modified_base 3050: mod_base = OTHER; note = thymine
  modified_base 3055: mod_base = OTHER; note = thymine
  modified_base 3058..3059: mod_base = OTHER; note = thymine
  modified_base 3061: mod_base = OTHER; note = thymine
  modified_base 3068: mod_base = OTHER; note = thymine
  modified_base 3089: mod_base = OTHER; note = thymine
  modified_base 3091: mod_base = OTHER; note = thymine
  modified_base 3095: mod_base = OTHER; note = thymine
  modified_base 3110: mod_base = OTHER; note = thymine
  modified_base 3118: mod_base = OTHER; note = thymine
  modified_base 3137: mod_base = OTHER; note = thymine
  modified_base 3146: mod_base = OTHER; note = thymine
  modified_base 3152: mod_base = OTHER; note = thymine
  modified_base 3164: mod_base = OTHER; note = thymine
  modified_base 3166: mod_base = OTHER; note = thymine
  modified_base 3169..3170: mod_base = OTHER; note = thymine
  modified_base 3178: mod_base = OTHER; note = thymine
  modified_base 3185: mod_base = OTHER; note = thymine
  modified_base 3194: mod_base = OTHER; note = thymine
  modified_base 3206: mod_base = OTHER; note = thymine
  modified_base 3214: mod_base = OTHER; note = thymine
  modified_base 3221: mod_base = OTHER; note = thymine
  modified_base 3239: mod_base = OTHER; note = thymine
  misc_feature 1..3246: note = Synthetic
  source 1..3246: mol_type = other RNA
atggcagcattcaaaccaaacccaatcaactacatcctaggactagcaatcggaatcgcatcagtaggatgagcaatggtagaaatcgacgaagaagaaaacccaatccgactaatcgacctaggagtacgagtattcgaacgagcagaagtaccaaaaacaggagactcactagcaatggcacgacgactagcacgatcagtacgacgactaacacgacgacgagcacaccgactactacgagcacgacgactactaaaacgagaaggagtactacaagcagcagacttcgacgaaaacggactaatcaaatcactaccaaacacaccatgacaactacgagcagcagcactagaccgaaaactaacaccactagaatgatcagcagtactactacacctaatcaaacaccgaggatacctatcacaacgaaaaaacgaaggagaaacagcagacaaagaactaggagcactactaaaaggagtagcagacaacgcacacgcactacaaacaggagacttccgaacaccagcagaactagcactaaacaaattcgaaaaagaatgcggacacatccgaaaccaacgaggagactactcacacacattctcacgaaaagacctacaagcagaactaaacctactattcgaaaaacaaaaagaattcggaaacccacacgtatcaggaggactaaaagaaggaatcgaaacactactaatgacacaacgaccagcactatcaggagacgcagtacaaaaaatgctaggacactgcacattcgaaccagcagaaccaaaagcagcaaaaaacacatacacagcagaacgattcatctgactaacaaaactaaacaacctacgaatcctagaacaaggatcagaacgaccactaacagacacagaacgagcaacactaatggacgaaccataccgaaaatcaaaactaacatacgcacaagcacgaaaactactatcactagaagacacagcattcttcaaaggactacgatacggaaaagacaacgcagaagcatcaacactaatggaaatgaaagcataccacacaatctcacgagcactagaaaaagaaggactaaaagacaaaaaatcaccactaaacctatcaccagaactacaagacgaaatcggaacagcattctcactattcaaaacagacgaagacatcacaggacgactaaaagaccgaatccaaccagaaatcctagaagcactactaaaacacatctcattcgacaaattcgtacaaatctcactaaaagcactacgacgaatcgtaccactaatggaacaaggaaaacgatacgacgaagcatgcgcagaaatctacggagaccactacggaaaaaaaaacacagaagaaaaaatctacctaccaccaatcccagcagacgaaatccgaaacccagtagtactacgagcactatcacaagcacgaaaagtaatcaacggagtagtacgacgatacggatcaccagcacgaatccacatcgaaacagcacgagaagtaggaaaatcattcaaagaccgaaaagaaatcgaaaaacgacaagaagaaaaccgaaaagaccgagaaaaagcagcagcaaaattccgagaatacttcccaaacttcgtaggagaaccaaaatcaaaagacatcctaaaactacgactatacgaacaacaacacggaaaatgcctatactcaggaaaagaaatcaacctaggacgactaaacgaaaaaggatacgtagaaatcgacgcagcactaccattctcacgaacatgagacgactcattcaacaacaaagtactagtactaggatcagaaaaccaaaacaaaggaaaccaaacaccatacgaatacttcaacggaaaagacaactcacgagaatgacaagaattcaaagcacgagtagaaacatcacgattcccacgatcaaaaaaacaacgaatcctactacaaaaattcgacgaagacggattcaaagaacgaaacctaaacgacacacgatacgtaaaccgattcctatgccaattcgtagcagaccgaatgcgactaacaggaaaaggaaaaaaacgagtattcgcatcaaacggacaaatcacaaacctactacgaggattctgaggactacgaaaagtacgagcagaaaacgaccgacaccacgcactagacgcagtagtagtagcatgctcaacagtagcaatgcaacaaaaaatcacacgattcgtacgatacaaagaaatgaacgcattcgacggaaaaacaatcgacaaagaaacaggagaagtactacaccaaaaaacacacttcccacaaccatgagaattcttcgcacaagaagtaatgatccgagtattcggaaaaccagacggaaaaccagaattcgaagaagcagacacaccagaaaaactacgaacactactagcagaaaaactatcatcacgaccagaagcagtacacgaatacgtaacaccactattcgtatcacgagcaccaaaccgaaaaatgtcaggacaaggacacatggaaacagtaaaatcagcaaaacgactagacgaaggagtatcagtactacgagtaccactaacacaactaaaactaaaagacctagaaaaaatggtaaaccgagaacgagaaccaaaactatacgaagcactaaaagcacgactagaagcacacaaagacgacccagcaaaagcattcgcagaaccattctacaaatacgacaaagcaggaaaccgaacacaacaagtaaaagcagtacgagtagaacaagtacaaaaaacaggagtatgagtacgaaaccacaacggaatcgcagacaacgcaacaatggtacgagtagacgtattcgaaaaaggagacaaatactacctagtaccaatctactcatgacaagtagcaaaaggaatcctaccagaccgagcagtagtagcatacgcagacgaagaagactgaacagtaatcgacgaatcattccgattcaaattcgtactatactcaaacgacctaatcaaagtacaactaaaaaaagactcattcctaggatacttctcaggactagaccgagcaacaggagcaatctcactacgagaacacgacctagaaaaatcaaaaggaaaagacggaatgcaccgaatcggagtaaaaacagcactatcattccaaaaataccaaatcgacgaaatgggaaaagaaatccgaccatgccgactaaaaaaacgaccaccagtacgataa

SEQ ID NO: 290 - protein, 1081 aa, synthetic construct
  REGION 1..1081: note = Synthetic
MAAFKPNPINYILGLAIGIASVGWAMVEIDEEENPIRLIDLGVRVFERAEVPKTGDSLAMARRLARSVRRLTRRRAHRLLRARRLLKREGVLQAADFDENGLIKSLPNTPWQLRAAALDRKLTPLEWSAVLLHLIKHRGYLSQRKNEGETADKELGALLKGVADNAHALQTGDFRTPAELALNKFEKECGHIRNQRGDYSHTFSRKDLQAELNLLFEKQKEFGNPHVSGGLKEGIETLLMTQRPALSGDAVQKMLGHCTFEPAEPKAAKNTYTAERFIWLTKLNNLRILEQGSERPLTDTERATLMDEPYRKSKLTYAQARKLLSLEDTAFFKGLRYGKDNAEASTLMEMKAYHTISRALEKEGLKDKKSPLNLSPELQDEIGTAFSLFKTDEDITGRLKDRIQPEILEALLKHISFDKFVQISLKALRRIVPLMEQGKRYDEACAEIYGDHYGKKNTEEKIYLPPIPADEIRNPVVLRALSQARKVINGVVRRYGSPARIHIETAREVGKSFKDRKEIEKRQEENRKDREKAAAKFREYFPNFVGEPKSKDILKLRLYEQQHGKCLYSGKEINLGRLNEKGYVEIDHALPFSRTWDDSFNNKVLVLGSENQNKGNQTPYEYFNGKDNSREWQEFKARVETSRFPRSKKQRILLQKFDEDGFKERNLNDTRYVNRFLCQFVADRMRLTGKGKKRVFASNGQITNLLRGFWGLRKVRAENDRHHALDAVVVACSTVAMQQKITRFVRYKEMNAFDGKTIDKETGEVLHQKTHFPQPWEFFAQEVMIRVFGKPDGKPEFEEADTPEKLRTLLAEKLSSRPEAVHEYVTPLFVSRAPNRKMSGQGHMETVKSAKRLDEGVSVLRVPLTQLKLKDLEKMVNREREPKLYEALKARLEAHKDDPAKAFAEPFYKYDKAGNRTQQVKAVRVEQVQKTGVWVRNHNGIADNATMVRVDVFEKGDKYYLVPIYSWQVAKGILPDRAVVAYADEEDWTVIDESFRFKFVLYSNDLIKVQLKKDSFLGYFSGLDRATGAISLREHDLEKSKGKDGMHRIGVKTALSFQKYQIDEMGKEIRPCRLKKRPPVR

SEQ ID NO: 291 - DNA, 3240 bp, synthetic construct
  misc_feature 1..3240: note = Synthetic
  source 1..3240: mol_type = other DNA
gctgcttttaagcctaatcctattaattatattcttggtcttgctattggtattgcttctgttggttgggctatggttgagattgatgaggaggagaatcctattcgtcttattgatcttggtgttcgtgtttttgagcgtgctgaggttcctaagactggtgattctcttgctatggctcgtcgtcttgctcgttctgttcgtcgtcttactcgtcgtcgtgctcatcgtcttcttcgtgctcgtcgtcttcttaagcgtgagggtgttcttcaggctgctgattttgatgagaatggtcttattaagtctcttcctaatactccttggcagcttcgtgctgctgctcttgatcgtaagcttactcctcttgagtggtctgctgttcttcttcatcttattaagcatcgtggttatctttctcagcgtaagaatgagggtgagactgctgataaggagcttggtgctcttcttaagggtgttgctgataatgctcatgctcttcagactggtgattttcgtactcctgctgagcttgctcttaataagtttgagaaggagtgtggtcatattcgtaatcagcgtggtgattattctcatactttttctcgtaaggatcttcaggctgagcttaatcttctttttgagaagcagaaggagtttggtaatcctcatgtttctggtggtcttaaggagggtattgagactcttcttatgactcagcgtcctgctctttctggtgatgctgttcagaagatgcttggtcattgtacttttgagcctgctgagcctaaggctgctaagaatacttatactgctgagcgttttatttggcttactaagcttaataatcttcgtattcttgagcagggttctgagcgtcctcttactgatactgagcgtgctactcttatggatgagccttatcgtaagtctaagcttacttatgctcaggctcgtaagcttctttctcttgaggatactgctttttttaagggtcttcgttatggtaaggataatgctgaggcttctactcttatggagatgaaggcttatcatactatttctcgtgctcttgagaaggagggtcttaaggataagaagtctcctcttaatctttctcctgagcttcaggatgagattggtactgctttttctctttttaagactgatgaggatattactggtcgtcttaaggatcgtattcagcctgagattcttgaggctcttcttaagcatatttcttttgataagtttgttcagatttctcttaaggctcttcgtcgtattgttcctcttatggagcagggtaagcgttatgatgaggcttgtgctgagatttatggtgatcattatggtaagaagaatactgaggagaagatttatcttcctcctattcctgctgatgagattcgtaatcctgttgttcttcgtgctctttctcaggctcgtaaggttattaatggtgttgttcgtcgttatggttctcctgctcgtattcatattgagactgctcgtgaggttggtaagtcttttaaggatcgtaaggagattgagaagcgtcaggaggagaatcgtaaggatcgtgagaaggctgctgctaagtttcgtgagtattttcctaattttgttggtgagcctaagtctaaggatattcttaagcttcgtctttatgagcagcagcatggtaagtgtctttattctggtaaggagattaatcttggtcgtcttaatgagaagggttatgttgagattgatcatgctcttcctttttctcgtacttgggatgattcttttaataataaggttcttgttcttggttctgagaatcagaataagggtaatcagactccttatgagtattttaatggtaaggataattctcgtgagtggcaggagtttaaggctcgtgttgagacttctcgttttcctcgttctaagaagcagcgtattcttcttcagaagtttgatgaggatggttttaaggagcgtaatcttaatgatactcgttatgttaatcgttttctttgtcagtttgttgctgatcgtatgcgtcttactggtaagggtaagaagcgtgtttttgcttctaatggtcagattactaatcttcttcgtggtttttggggtcttcgtaaggttcgtgctgagaatgatcgtcatcatgctcttgatgctgttgttgttgcttgttctactgttgctatgcagcagaagattactcgttttgttcgttataaggagatgaatgcttttgatggtaagactattgataaggagactggtgaggttcttcatcagaagactcattttcctcagccttgggagttttttgctcaggaggttatgattcgtgtttttggtaagcctgatggtaagcctgagtttgaggaggctgatactcctgagaagcttcgtactcttcttgctgagaagctttcttctcgtcctgaggctgttcatgagtatgttactcctctttttgtttctcgtgctcctaatcgtaagatgtctggtcagggtcatatggagactgttaagtctgctaagcgtcttgatgagggtgtttctgttcttcgtgttcctcttactcagcttaagcttaaggatcttgagaagatggttaatcgtgagcgtgagcctaagctttatgaggctcttaaggctcgtcttgaggctcataaggatgatcctgctaaggcttttgctgagcctttttataagtatgataaggctggtaatcgtactcagcaggttaaggctgttcgtgttgagcaggttcagaagactggtgtttgggttcgtaatcataatggtattgctgataatgctactatggttcgtgttgatgtttttgagaagggtgataagtattatcttgttcctatttattcttggcaggttgctaagggtattcttcctgatcgtgctgttgttgcttatgctgatgaggaggattggactgttattgatgagtcttttcgttttaagtttgttctttattctaatgatcttattaaggttcagcttaagaaggattcttttcttggttatttttctggtcttgatcgtgctactggtgctatttctcttcgtgagcatgatcttgagaagtctaagggtaaggatggtatgcatcgtattggtgttaagactgctctttcttttcagaagtatcagattgatgagatgggtaaggagattcgtccttgtcgtcttaagaagcgtcctcctgttcgt

SEQ ID NO: 292 - DNA, 3240 bp, synthetic construct
  misc_feature 1..3240: note = Synthetic
  source 1..3240: mol_type = other DNA
gccgccttcaagcccaaccccatcaactacatcctgggcctggccatcggcatcgcctccgtgggctgggccatggtggagatcgacgaggaggagaaccccatccggctgatcgacctgggcgtgcgggtgttcgagcgggccgaggtgcccaagaccggcgactccctggccatggcccggcggctggcccggtccgtgcggcggctgacccggcggcgggcccaccggctgctgcgggcccggcggctgctgaagcgggagggcgtgctgcaggccgccgacttcgacgagaacggcctgatcaagtccctgcccaacaccccctggcagctgcgggccgccgccctggaccggaagctgacccccctggagtggtccgccgtgctgctgcacctgatcaagcaccggggctacctgtcccagcggaagaacgagggcgagaccgccgacaaggagctgggcgccctgctgaagggcgtggccgacaacgcccacgccctgcagaccggcgacttccggacccccgccgagctggccctgaacaagttcgagaaggagtgcggccacatccggaaccagcggggcgactactcccacaccttctcccggaaggacctgcaggccgagctgaacctgctgttcgagaagcagaaggagttcggcaacccccacgtgtccggcggcctgaaggagggcatcgagaccctgctgatgacccagcggcccgccctgtccggcgacgccgtgcagaagatgctgggccactgcaccttcgagcccgccgagcccaaggccgccaagaacacctacaccgccgagcggttcatctggctgaccaagctgaacaacctgcggatcctggagcagggctccgagcggcccctgaccgacaccgagcgggccaccctgatggacgagccctaccggaagtccaagctgacctacgcccaggcccggaagctgctgtccctggaggacaccgccttcttcaagggcctgcggtacggcaaggacaacgccgaggcctccaccctgatggagatgaaggcctaccacaccatctcccgggccctggagaaggagggcctgaaggacaagaagtcccccctgaacctgtcccccgagctgcaggacgagatcggcaccgccttctccctgttcaagaccgacgaggacatcaccggccggctgaaggaccggatccagcccgagatcctggaggccctgctgaagcacatctccttcgacaagttcgtgcagatctccctgaaggccctgcggcggatcgtgcccctgatggagcagggcaagcggtacgacgaggcctgcgccgagatctacggcgaccactacggcaagaagaacaccgaggagaagatctacctgccccccatccccgccgacgagatccggaaccccgtggtgctgcgggccctgtcccaggcccggaaggtgatcaacggcgtggtgcggcggtacggctcccccgcccggatccacatcgagaccgcccgggaggtgggcaagtccttcaaggaccggaaggagatcgagaagcggcaggaggagaaccggaaggaccgggagaaggccgccgccaagttccgggagtacttccccaacttcgtgggcgagcccaagtccaaggacatcctgaagctgcggctgtacgagcagcagcacggcaagtgcctgtactccggcaaggagatcaacctgggccggctgaacgagaagggctacgtggagatcgaccacgccctgcccttctcccggacctgggacgactccttcaacaacaaggtgctggtgctgggctccgagaaccagaacaagggcaaccagaccccctacgagtacttcaacggcaaggacaactcccgggagtggcaggagttcaaggcccgggtggagacctcccggttcccccggtccaagaagcagcggatcctgctgcagaagttcgacgaggacggcttcaaggagcggaacctgaacgacacccggtacgtgaaccggttcctgtgccagttcgtggccgaccggatgcggctgaccggcaagggcaagaagcgggtgttcgcctccaacggccagatcaccaacctgctgcggggcttctggggcctgcggaaggtgcgggccgagaacgaccggcaccacgccctggacgccgtggtggtggcctgctccaccgtggccatgcagcagaagatcacccggttcgtgcggtacaaggagatgaacgccttcgacggcaagaccatcgacaaggagaccggcgaggtgctgcaccagaagacccacttcccccagccctgggagttcttcgcccaggaggtgatgatccgggtgttcggcaagcccgacggcaagcccgagttcgaggaggccgacacccccgagaagctgcggaccctgctggccgagaagctgtcctcccggcccgaggccgtgcacgagtacgtgacccccctgttcgtgtcccgggcccccaaccggaagatgtccggccagggccacatggagaccgtgaagtccgccaagcggctggacgagggcgtgtccgtgctgcgggtgcccctgacccagctgaagctgaaggacctggagaagatggtgaaccgggagcgggagcccaagctgtacgaggccctgaaggcccggctggaggcccacaaggacgaccccgccaaggccttcgccgagcccttctacaagtacgacaaggccggcaaccggacccagcaggtgaaggccgtgcgggtggagcaggtgcagaagaccggcgtgtgggtgcggaaccacaacggcatcgccgacaacgccaccatggtgcgggtggacgtgttcgagaagggcgacaagtactacctggtgcccatctactcctggcaggtggccaagggcatcctgcccgaccgggccgtggtggcctacgccgacgaggaggactggaccgtgatcgacgagtccttccggttcaagttcgtgctgtactccaacgacctgatcaaggtgcagctgaagaaggactccttcctgggctacttctccggcctggaccgggccaccggcgccatctccctgcgggagcacgacctggagaagtccaagggcaaggacggcatgcaccggatcggcgtgaagaccgccctgtccttccagaagtaccagatcgacgagatgggcaaggagatccggccctgccggctgaagaagcggccccccgtgcgg

SEQ ID NO: 293 - DNA, 3240 bp, synthetic construct
  misc_feature 1..3240: note = Synthetic
  source 1..3240: mol_type = other DNA
gcagcattcaaaccaaacccaatcaactacatcctaggactagcaatcggaatcgcatcagtaggatgagcaatggtagaaatcgacgaagaagaaaacccaatccgactaatcgacctaggagtacgagtattcgaacgagcagaagtaccaaaaacaggagactcactagcaatggcacgacgactagcacgatcagtacgacgactaacacgacgacgagcacaccgactactacgagcacgacgactactaaaacgagaaggagtactacaagcagcagacttcgacgaaaacggactaatcaaatcactaccaaacacaccatgacaactacgagcagcagcactagaccgaaaactaacaccactagaatgatcagcagtactactacacctaatcaaacaccgaggatacctatcacaacgaaaaaacgaaggagaaacagcagacaaagaactaggagcactactaaaaggagtagcagacaacgcacacgcactacaaacaggagacttccgaacaccagcagaactagcactaaacaaattcgaaaaagaatgcggacacatccgaaaccaacgaggagactactcacacacattctcacgaaaagacctacaagcagaactaaacctactattcgaaaaacaaaaagaattcggaaacccacacgtatcaggaggactaaaagaaggaatcgaaacactactaatgacacaacgaccagcactatcaggagacgcagtacaaaaaatgctaggacactgcacattcgaaccagcagaaccaaaagcagcaaaaaacacatacacagcagaacgattcatctgactaacaaaactaaacaacctacgaatcctagaacaaggatcagaacgaccactaacagacacagaacgagcaacactaatggacgaaccataccgaaaatcaaaactaacatacgcacaagcacgaaaactactatcactagaagacacagcattcttcaaaggactacgatacggaaaagacaacgcagaagcatcaacactaatggaaatgaaagcataccacacaatctcacgagcactagaaaaagaaggactaaaagacaaaaaatcaccactaaacctatcaccagaactacaagacgaaatcggaacagcattctcactattcaaaacagacgaagacatcacaggacgactaaaagaccgaatccaaccagaaatcctagaagcactactaaaacacatctcattcgacaaattcgtacaaatctcactaaaagcactacgacgaatcgtaccactaatggaacaaggaaaacgatacgacgaagcatgcgcagaaatctacggagaccactacggaaaaaaaaacacagaagaaaaaatctacctaccaccaatcccagcagacgaaatccgaaacccagtagtactacgagcactatcacaagcacgaaaagtaatcaacggagtagtacgacgatacggatcaccagcacgaatccacatcgaaacagcacgagaagtaggaaaatcattcaaagaccgaaaagaaatcgaaaaacgacaagaagaaaaccgaaaagaccgagaaaaagcagcagcaaaattccgagaatacttcccaaacttcgtaggagaaccaaaatcaaaagacatcctaaaactacgactatacgaacaacaacacggaaaatgcctatactcaggaaaagaaatcaacctaggacgactaaacgaaaaaggatacgtagaaatcgaccacgcactaccattctcacgaacatgagacgactcattcaacaacaaagtactagtactaggatcagaaaaccaaaacaaaggaaaccaaacaccatacgaatacttcaacggaaaagacaactcacgagaatgacaagaattcaaagcacgagtagaaacatcacgattcccacgatcaaaaaaacaacgaatcctactacaaaaattcgacgaagacggattcaaagaacgaaacctaaacgacacacgatacgtaaaccgattcctatgccaattcgtagcagaccgaatgcgactaacaggaaaaggaaaaaaacgagtattcgcatcaaacggacaaatcacaaacctactacgaggattctgaggactacgaaaagtacgagcagaaaacgaccgacaccacgcactagacgcagtagtagtagcatgctcaacagtagcaatgcaacaaaaaatcacacgattcgtacgatacaaagaaatgaacgcattcgacggaaaaacaatcgacaaagaaacaggagaagtactacaccaaaaaacacacttcccacaaccatgagaattcttcgcacaagaagtaatgatccgagtattcggaaaaccagacggaaaaccagaattcgaagaagcagacacaccagaaaaactacgaacactactagcagaaaaactatcatcacgaccagaagcagtacacgaatacgtaacaccactattcgtatcacgagcaccaaaccgaaaaatgtcaggacaaggacacatggaaacagtaaaatcagcaaaacgactagacgaaggagtatcagtactacgagtaccactaacacaactaaaactaaaagacctagaaaaaatggtaaaccgagaacgagaaccaaaactatacgaagcactaaaagcacgactagaagcacacaaagacgacccagcaaaagcattcgcagaaccattctacaaatacgacaaagcaggaaaccgaacacaacaagtaaaagcagtacgagtagaacaagtacaaaaaacaggagtatgagtacgaaaccacaacggaatcgcagacaacgcaacaatggtacgagtagacgtattcgaaaaaggagacaaatactacctagtaccaatctactcatgacaagtagcaaaaggaatcctaccagaccgagcagtagtagcatacgcagacgaagaagactgaacagtaatcgacgaatcattccgattcaaattcgtactatactcaaacgacctaatcaaagtacaactaaaaaaagactcattcctaggatacttctcaggactagaccgagcaacaggagcaatctcactacgagaacacgacctagaaaaatcaaaaggaaaagacggaatgcaccgaatcggagtaaaaacagcactatcattccaaaaataccaaatcgacgaaatgggaaaagaaatccgaccatgccgactaaaaaaacgaccaccagtacga

SEQ ID NO: 294 - RNA, 3246 nt, synthetic construct
  modified_base 2: mod_base = OTHER; note = thymine
  modified_base 6: mod_base = OTHER; note = thymine
  modified_base 9..12: mod_base = OTHER; note = thymine
  modified_base 18: mod_base = OTHER; note = thymine
  modified_base 21: mod_base = OTHER; note = thymine
  modified_base 24: mod_base = OTHER; note = thymine
  modified_base 26..27: mod_base = OTHER; note = thymine
  modified_base 30..31: mod_base = OTHER; note = thymine
  modified_base 33: mod_base = OTHER; note = thymine
  modified_base 35..36: mod_base = OTHER; note = thymine
  modified_base 38..39: mod_base = OTHER; note = thymine
  modified_base 42: mod_base = OTHER; note = thymine
  modified_base 44..45: mod_base = OTHER; note = thymine
  modified_base 48: mod_base = OTHER; note = thymine
  modified_base 50..51: mod_base = OTHER; note = thymine
  modified_base 54: mod_base = OTHER; note = thymine
  modified_base 56..57: mod_base = OTHER; note = thymine
  modified_base 60..61: mod_base = OTHER; note = thymine
  modified_base 63: mod_base = OTHER; note = thymine
  modified_base 65..66: mod_base = OTHER; note = thymine
  modified_base 69..70: mod_base = OTHER; note = thymine
  modified_base 75: mod_base = OTHER; note = thymine
  modified_base 77: mod_base = OTHER; note = thymine
  modified_base 80..81: mod_base = OTHER; note = thymine
  modified_base 86..87: mod_base = OTHER; note = thymine
  modified_base 90: mod_base = OTHER; note = thymine
  modified_base 102: mod_base = OTHER; note = thymine
  modified_base 105: mod_base = OTHER; note = thymine
  modified_base 107..108: mod_base = OTHER; note = thymine
  modified_base 111: mod_base = OTHER; note = thymine
  modified_base 113..114: mod_base = OTHER; note = thymine
  modified_base 116..117: mod_base = OTHER; note = thymine
  modified_base 120: mod_base = OTHER; note = thymine
  modified_base 122..123: mod_base = OTHER; note = thymine
  modified_base 126: mod_base = OTHER; note = thymine
  modified_base 128..129: mod_base = OTHER; note = thymine
  modified_base 132: mod_base = OTHER; note = thymine
  modified_base 134..138: mod_base = OTHER; note = thymine
  modified_base 144: mod_base = OTHER; note = thymine
  modified_base 147: mod_base = OTHER; note = thymine
  modified_base 152..153: mod_base = OTHER; note = thymine
  modified_base 156: mod_base = OTHER; note = thymine
  modified_base 162: mod_base = OTHER; note = thymine
  modified_base 165: mod_base = OTHER; note = thymine
  modified_base 168..169: mod_base = OTHER; note = thymine
  modified_base 171: mod_base = OTHER; note = thymine
  modified_base 173..174: mod_base = OTHER; note = thymine
  modified_base 177: mod_base = OTHER; note = thymine
  modified_base 179: mod_base = OTHER; note = thymine
  modified_base 183: mod_base = OTHER; note = thymine
  modified_base 186: mod_base = OTHER; note = thymine
  modified_base 189: mod_base = OTHER; note = thymine
  modified_base 191..192: mod_base = OTHER; note = thymine
  modified_base 195: mod_base = OTHER; note = thymine
  modified_base 198..199: mod_base = OTHER; note = thymine
  modified_base 201: mod_base = OTHER; note = thymine
  modified_base 203..204: mod_base = OTHER; note = thymine
  modified_base 207: mod_base = OTHER; note = thymine
  modified_base 210: mod_base = OTHER; note = thymine
  modified_base 212..213: mod_base = OTHER; note = thymine
  modified_base 216: mod_base = OTHER; note = thymine
  modified_base 219: mod_base = OTHER; note = thymine
  modified_base 222: mod_base = OTHER; note = thymine
  modified_base 225: mod_base = OTHER; note = thymine
  modified_base 228: mod_base = OTHER; note = thymine
  modified_base 231: mod_base = OTHER; note = thymine
  modified_base 234: mod_base = OTHER; note = thymine
  modified_base 236..237: mod_base = OTHER; note = thymine
  modified_base 239..240: mod_base = OTHER; note = thymine
  modified_base 243: mod_base = OTHER; note = thymine
  modified_base 246: mod_base = OTHER; note = thymine
  modified_base 249: mod_base = OTHER; note = thymine
  modified_base 252: mod_base = OTHER; note = thymine
  modified_base 254..255: mod_base = OTHER; note = thymine
  modified_base 257..258: mod_base = OTHER; note = thymine
  modified_base 264: mod_base = OTHER; note = thymine
  modified_base 270: mod_base = OTHER; note = thymine
  modified_base 272..273: mod_base = OTHER; note = thymine
  modified_base 275..276: mod_base = OTHER; note = thymine
  modified_base 282: mod_base = OTHER; note = thymine
  modified_base 285: mod_base = OTHER; note = thymine
  modified_base 288..291: mod_base = OTHER; note = thymine
  modified_base 294: mod_base = OTHER; note = thymine
  modified_base 300: mod_base = OTHER; note = thymine
  modified_base 303: mod_base = OTHER; note = thymine
  modified_base 305..306: mod_base = OTHER; note = thymine
  modified_base 308..309: mod_base = OTHER; note = thymine
  modified_base 313: mod_base = OTHER; note = thymine
  modified_base 315: mod_base = OTHER; note = thymine
  modified_base 317..318: mod_base = OTHER; note = thymine
  modified_base 321: mod_base = OTHER; note = thymine
  modified_base 324: mod_base = OTHER; note = thymine
  modified_base 327: mod_base = OTHER; note = thymine
  modified_base 330..331: mod_base = OTHER; note = thymine
  modified_base 338..339: mod_base = OTHER; note = thymine
  modified_base 342: mod_base = OTHER; note = thymine
  modified_base 345: mod_base = OTHER; note = thymine
  modified_base 348: mod_base = OTHER; note = thymine
  modified_base 351: mod_base = OTHER; note = thymine
  modified_base 353..354: mod_base = OTHER; note = thymine
  modified_base 357: mod_base = OTHER; note = thymine
  modified_base 360: mod_base = OTHER; note = thymine
  modified_base 365..366: mod_base = OTHER; note = thymine
  modified_base 369: mod_base = OTHER; note = thymine
  modified_base 372: mod_base = OTHER; note = thymine
  modified_base 374..375: mod_base = OTHER; note = thymine
  modified_base 379: mod_base = OTHER; note = thymine
  modified_base 382: mod_base = OTHER; note = thymine
  modified_base 384: mod_base = OTHER; note = thymine
  modified_base 387: mod_base = OTHER; note = thymine
  modified_base 389..390: mod_base = OTHER; note = thymine
  modified_base 392..393: mod_base = OTHER; note = thymine
  modified_base 395..396: mod_base = OTHER; note = thymine
  modified_base 399: mod_base = OTHER; note = thymine
  modified_base 401..402: mod_base = OTHER; note = thymine
  modified_base 404..405: mod_base = OTHER; note = thymine
  modified_base 411: mod_base = OTHER; note = thymine
  modified_base 414: mod_base = OTHER; note = thymine
  modified_base 417..418: mod_base = OTHER; note = thymine
  modified_base 420: mod_base = OTHER; note = thymine
  modified_base 422..424: mod_base = OTHER; note = thymine
  modified_base 426: mod_base = OTHER; note = thymine
  modified_base 432: mod_base = OTHER; note = thymine
  modified_base 438: mod_base = OTHER; note = thymine
  modified_base 444: mod_base = OTHER; note = thymine
  modified_base 450: mod_base = OTHER; note = thymine
  modified_base 453: mod_base = OTHER; note = thymine
  modified_base 456: mod_base = OTHER; note = thymine
  modified_base 464..465: mod_base = OTHER; note = thymine
  modified_base 468: mod_base = OTHER; note = thymine
  modified_base 471: mod_base = OTHER; note = thymine
  modified_base 473..474: mod_base = OTHER; note = thymine
  modified_base 476..477: mod_base = OTHER; note = thymine
  modified_base 483: mod_base = OTHER; note = thymine
  modified_base 485..486: mod_base = OTHER; note = thymine
  modified_base 489: mod_base = OTHER; note = thymine
  modified_base 492: mod_base = OTHER; note = thymine
  modified_base 495: mod_base = OTHER; note = thymine
  modified_base 498: mod_base = OTHER; note = thymine
  modified_base 501: mod_base = OTHER; note = thymine
  modified_base 504: mod_base = OTHER; note = thymine
  modified_base 506..507: mod_base = OTHER; note = thymine
  modified_base 513: mod_base = OTHER; note = thymine
  modified_base 516: mod_base = OTHER; note = thymine
  modified_base 519..522: mod_base = OTHER; note = thymine
  modified_base 525: mod_base = OTHER; note = thymine
  modified_base 528: mod_base = OTHER; note = thymine
  modified_base 531: mod_base = OTHER; note = thymine
  modified_base 534: mod_base = OTHER; note = thymine
  modified_base 539..540: mod_base = OTHER; note = thymine
  modified_base 543: mod_base = OTHER; note = thymine
  modified_base 545..546: mod_base = OTHER; note = thymine
  modified_base 549: mod_base = OTHER; note = thymine
  modified_base 553..555: mod_base = OTHER; note = thymine
  modified_base 565: mod_base = OTHER; note = thymine
  modified_base 567: mod_base = OTHER; note = thymine
  modified_base 570: mod_base = OTHER; note = thymine
  modified_base 573: mod_base = OTHER; note = thymine
  modified_base 575..576: mod_base = OTHER; note = thymine
  modified_base 579: mod_base = OTHER; note = thymine
  modified_base 582: mod_base = OTHER; note = thymine
  modified_base 588: mod_base = OTHER; note = thymine
  modified_base 591: mod_base = OTHER; note = thymine
  modified_base 594..595: mod_base = OTHER; note = thymine
  modified_base 597..598: mod_base = OTHER; note = thymine
  modified_base 600: mod_base = OTHER; note = thymine
  modified_base 603: mod_base = OTHER; note = thymine
  modified_base 606..610: mod_base = OTHER; note = thymine
  modified_base 612: mod_base = OTHER; note = thymine
  modified_base 615: mod_base = OTHER; note = thymine
  modified_base 621: mod_base = OTHER; note = thymine
  modified_base 623..624: mod_base = OTHER; note = thymine
  modified_base 630: mod_base = OTHER; note = thymine
  modified_base 635..636: mod_base = OTHER; note = thymine
  modified_base 639: mod_base = OTHER; note = thymine
  modified_base 641..642: mod_base = OTHER; note = thymine
  modified_base 644..648: mod_base = OTHER; note = thymine
  modified_base 664..666: mod_base = OTHER; note = thymine
  modified_base 669: mod_base = OTHER; note = thymine
  modified_base 672: mod_base = OTHER; note = thymine
  modified_base 675: mod_base = OTHER; note = thymine
  modified_base 678: mod_base = OTHER; note = thymine
  modified_base 680..682: mod_base = OTHER; note = thymine
  modified_base 684: mod_base = OTHER; note = thymine
  modified_base 687: mod_base = OTHER; note = thymine
  modified_base 690: mod_base = OTHER; note = thymine
  modified_base 692..693: mod_base = OTHER; note = thymine
  modified_base 702: mod_base = OTHER; note = thymine
  modified_base 704..705: mod_base = OTHER; note = thymine
  modified_base 711: mod_base = OTHER; note = thymine
  modified_base 713..714: mod_base = OTHER; note = thymine
  modified_base 716..717: mod_base = OTHER; note = thymine
  modified_base 719: mod_base = OTHER; note = thymine
  modified_base 723: mod_base = OTHER; note = thymine
  modified_base 729: mod_base = OTHER; note = thymine
  modified_base 732: mod_base = OTHER; note = thymine
  modified_base 735: mod_base = OTHER; note = thymine
  modified_base 737..739: mod_base = OTHER; note = thymine
  modified_base 741: mod_base = OTHER; note = thymine
  modified_base 744: mod_base = OTHER; note = thymine
  modified_base 747: mod_base = OTHER; note = thymine
  modified_base 750: mod_base = OTHER; note = thymine
  modified_base 752..753: mod_base = OTHER; note = thymine
  modified_base 761: mod_base = OTHER; note = thymine
  modified_base 764..765: mod_base = OTHER; note = thymine
  modified_base 768: mod_base = OTHER; note = thymine
  modified_base 771..772: mod_base = OTHER; note = thymine
  modified_base 774: mod_base = OTHER; note = thymine
  modified_base 777..780: mod_base = OTHER; note = thymine
  modified_base 786: mod_base = OTHER; note = thymine
  modified_base 789: mod_base = OTHER; note = thymine
  modified_base 795: mod_base = OTHER; note = thymine
  modified_base 801: mod_base = OTHER; note = thymine
  modified_base 804: mod_base = OTHER; note = thymine
  modified_base 810: mod_base = OTHER; note = thymine
  modified_base 813..814: mod_base = OTHER; note = thymine
  modified_base 816: mod_base = OTHER; note = thymine
  modified_base 819: mod_base = OTHER; note = thymine
  modified_base 822: mod_base = OTHER; note = thymine
  modified_base 828..831: mod_base = OTHER; note = thymine
  modified_base 833..835: mod_base = OTHER; note = thymine
  modified_base 839..840: mod_base = OTHER; note = thymine
  modified_base 843: mod_base = OTHER; note = thymine
  modified_base 848..849: mod_base = OTHER; note = thymine
  modified_base 852: mod_base = OTHER; note = thymine
  modified_base 855: mod_base = OTHER; note = thymine
  modified_base 857..858: mod_base = OTHER; note = thymine
  modified_base 861: mod_base = OTHER; note = thymine
  modified_base 863..864: mod_base = OTHER; note = thymine
  modified_base 866..867: mod_base = OTHER; note = thymine
  modified_base 876..877: mod_base = OTHER; note = thymine
  modified_base 879: mod_base = OTHER; note = thymine
  modified_base 885: mod_base = OTHER; note = thymine
  modified_base 888: mod_base = OTHER; note = thymine
  modified_base 890..891: mod_base = OTHER; note = thymine
  modified_base 894: mod_base = OTHER; note = thymine
  modified_base 897: mod_base = OTHER; note = thymine
  modified_base 900: mod_base = OTHER; note = thymine
  modified_base 906: mod_base = OTHER; note = thymine
  modified_base 909: mod_base = OTHER; note = thymine
  modified_base 912: mod_base = OTHER; note = thymine
  modified_base 914..915: mod_base = OTHER; note = thymine
  modified_base 917: mod_base = OTHER; note = thymine
  modified_base 921: mod_base = OTHER; note = thymine
  modified_base 927..928: mod_base = OTHER; note = thymine
  modified_base 930: mod_base = OTHER; note = thymine
  modified_base 933: mod_base = OTHER; note = thymine
  modified_base 937: mod_base = OTHER; note = thymine
  modified_base 939: mod_base = OTHER; note = thymine
  modified_base 944..945: mod_base = OTHER; note = thymine
  modified_base 948..949: mod_base = OTHER; note = thymine
  modified_base 951: mod_base = OTHER; note = thymine
  modified_base 954: mod_base = OTHER; note = thymine
  modified_base 960: mod_base = OTHER; note = thymine
  modified_base 963: mod_base = OTHER; note = thymine
  modified_base 968..969: mod_base = OTHER; note = thymine
  modified_base 971..973: mod_base = OTHER; note = thymine
  modified_base 975: mod_base = OTHER; note = thymine
  modified_base 977..978: mod_base = OTHER; note = thymine
  modified_base 984: mod_base = OTHER; note = thymine
  modified_base 987: mod_base = OTHER; note = thymine
  modified_base 990..996: mod_base = OTHER; note = thymine
  modified_base 1002: mod_base = OTHER; note = thymine
  modified_base 1004..1005: mod_base = OTHER; note = thymine
  modified_base 1008..1009: mod_base = OTHER; note = thymine
  modified_base 1011: mod_base = OTHER; note = thymine
  modified_base 1014: mod_base = OTHER; note = thymine
  modified_base 1020: mod_base = OTHER; note = thymine
  modified_base 1023: mod_base = OTHER; note = thymine
  modified_base 1026: mod_base = OTHER; note = thymine
  modified_base 1032..1033: mod_base = OTHER; note = thymine
  modified_base 1035: mod_base = OTHER; note = thymine
  modified_base 1038: mod_base = OTHER; note = thymine
  modified_base 1040..1041: mod_base = OTHER; note = thymine
  modified_base 1043: mod_base = OTHER; note = thymine
  modified_base 1049: mod_base = OTHER; note = thymine
  modified_base 1056..1057: mod_base = OTHER; note = thymine
  modified_base 1059: mod_base = OTHER; note = thymine
  modified_base 1062: mod_base = OTHER; note = thymine
  modified_base 1065: mod_base = OTHER; note = thymine
  modified_base 1067..1069: mod_base = OTHER; note = thymine
  modified_base 1071: mod_base = OTHER; note = thymine
  modified_base 1074: mod_base = OTHER; note = thymine
  modified_base 1077: mod_base = OTHER; note = thymine
  modified_base 1079..1080: mod_base = OTHER; note = thymine
  modified_base 1092: mod_base = OTHER; note = thymine
  modified_base 1094..1095: mod_base = OTHER; note = thymine
  modified_base 1101: mod_base = OTHER; note = thymine
  modified_base 1108: mod_base = OTHER; note = thymine
  modified_base 1110: mod_base = OTHER; note = thymine
  modified_base 1113: mod_base = OTHER; note = thymine
  modified_base 1115..1116: mod_base = OTHER; note = thymine
  modified_base 1119: mod_base = OTHER; note = thymine
  modified_base 1121..1123: mod_base = OTHER; note = thymine
  modified_base 1125: mod_base = OTHER; note = thymine
  modified_base 1128: mod_base = OTHER; note = thymine
  modified_base 1133..1134: mod_base = OTHER; note = thymine
  modified_base 1140: mod_base = OTHER; note = thymine
  modified_base 1145..1146: mod_base = OTHER; note = thymine
  modified_base 1149: mod_base = OTHER; note = thymine
  modified_base 1152: mod_base = OTHER; note = thymine
  modified_base 1155..1159: mod_base = OTHER; note = thymine
  modified_base 1161: mod_base = OTHER; note = thymine
  modified_base 1163..1167: mod_base = OTHER; note = thymine
  modified_base 1173: mod_base = OTHER; note = thymine
  modified_base 1176: mod_base = OTHER; note = thymine
  modified_base 1182: mod_base = OTHER; note = thymine
  modified_base 1184..1185: mod_base = OTHER; note = thymine
  modified_base 1188: mod_base = OTHER; note = thymine
  modified_base 1191: mod_base = OTHER; note = thymine
  modified_base 1194: mod_base = OTHER; note = thymine
  modified_base 1196..1197: mod_base = OTHER; note = thymine
  modified_base 1203: mod_base = OTHER; note = thymine
  modified_base 1206: mod_base = OTHER; note = thymine
  modified_base 1208..1209: mod_base = OTHER; note = thymine
  modified_base 1215: mod_base = OTHER; note = thymine
  modified_base 1220..1221: mod_base = OTHER; note = thymine
  modified_base 1223..1224: mod_base = OTHER; note = thymine
  modified_base 1230: mod_base = OTHER; note = thymine
  modified_base 1232..1233: mod_base = OTHER; note = thymine
  modified_base 1235..1236: mod_base = OTHER; note = thymine
  modified_base 1242: mod_base = OTHER; note = thymine
  modified_base 1244..1246: mod_base = OTHER; note = thymine
  modified_base 1248..1251: mod_base = OTHER; note = thymine
  modified_base 1254: mod_base = OTHER; note = thymine
  modified_base 1258..1260: mod_base = OTHER; note = thymine
  modified_base 1262..1263: mod_base = OTHER; note = thymine
  modified_base 1268..1270: mod_base = OTHER; note = thymine
  modified_base 1272: mod_base = OTHER; note = thymine
  modified_base 1274..1275: mod_base = OTHER; note = thymine
  modified_base 1281: mod_base = OTHER; note = thymine
  modified_base 1283..1284: mod_base = OTHER; note = thymine
  modified_base 1287: mod_base = OTHER; note = thymine
  modified_base 1290: mod_base = OTHER; note = thymine
  modified_base 1292..1293: mod_base = OTHER; note = thymine
  modified_base 1295..1296: mod_base = OTHER; note = thymine
  modified_base 1299: mod_base = OTHER; note = thymine
  modified_base 1301..1302: mod_base = OTHER; note = thymine
  modified_base 1304: mod_base = OTHER; note = thymine
  modified_base 1314: mod_base = OTHER; note = thymine
  modified_base 1320..1321: mod_base = OTHER; note = thymine
  modified_base 1323: mod_base = OTHER; note = thymine
  modified_base 1326: mod_base = OTHER; note = thymine
  modified_base 1332..1333: mod_base = OTHER; note = thymine
  modified_base 1335: mod_base = OTHER; note = thymine
  modified_base 1338: mod_base = OTHER; note = thymine
  modified_base 1343..1345: mod_base = OTHER; note = thymine
  modified_base 1347: mod_base = OTHER; note = thymine
  modified_base 1350: mod_base = OTHER; note = thymine
  modified_base 1353: mod_base = OTHER; note = thymine
  modified_base 1356..1357: mod_base = OTHER; note = thymine
  modified_base 1359: mod_base = OTHER; note = thymine
  modified_base 1362: mod_base = OTHER; note = thymine
  modified_base 1371: mod_base = OTHER; note = thymine
  modified_base 1374: mod_base = OTHER; note = thymine
  modified_base 1385..1387: mod_base = OTHER; note = thymine
  modified_base 1389: mod_base = OTHER; note = thymine
  modified_base 1391..1392: mod_base = OTHER; note = thymine
  modified_base 1395: mod_base = OTHER; note = thymine
  modified_base 1398: mod_base = OTHER; note = thymine
  modified_base 1400..1401: mod_base = OTHER; note = thymine
  modified_base 1404: mod_base = OTHER; note = thymine
  modified_base 1407: mod_base = OTHER; note = thymine
  modified_base 1410: mod_base = OTHER; note = thymine
  modified_base 1415..1416: mod_base = OTHER; note = thymine
  modified_base 1419: mod_base = OTHER; note = thymine
  modified_base 1422: mod_base = OTHER; note = thymine
  modified_base 1425: mod_base = OTHER; note = thymine
  modified_base 1427..1428: mod_base = OTHER; note = thymine
  modified_base 1430..1431: mod_base = OTHER; note = thymine
  modified_base 1433..1434: mod_base = OTHER; note = thymine
  modified_base 1437: mod_base = OTHER; note = thymine
  modified_base 1440: mod_base = OTHER; note = thymine
  modified_base 1442..1444: mod_base = OTHER; note = thymine
  modified_base 1446: mod_base = OTHER; note = thymine
  modified_base 1452: mod_base = OTHER; note = thymine
  modified_base 1455: mod_base = OTHER; note = thymine
  modified_base 1460..1461: mod_base = OTHER; note = thymine
  modified_base 1463..1464: mod_base = OTHER; note = thymine
  modified_base 1467: mod_base = OTHER; note = thymine
  modified_base 1470: mod_base = OTHER; note = thymine
  modified_base 1472..1473: mod_base = OTHER; note = thymine
  modified_base 1475..1476: mod_base = OTHER; note = thymine
  modified_base 1479: mod_base = OTHER; note = thymine
  modified_base 1482..1483: mod_base = OTHER; note = thymine
  modified_base 1485: mod_base = OTHER; note = thymine
  modified_base 1488..1489: mod_base = OTHER; note = thymine
  modified_base 1491: mod_base = OTHER; note = thymine
  modified_base 1494: mod_base = OTHER; note = thymine
  modified_base 1497: mod_base = OTHER; note = thymine
  modified_base 1500: mod_base = OTHER; note = thymine
  modified_base 1502..1503: mod_base = OTHER; note = thymine
  modified_base 1506: mod_base = OTHER; note = thymine
  modified_base 1508..1509: mod_base = OTHER; note = thymine
  modified_base 1515: mod_base = OTHER; note = thymine
  modified_base 1518: mod_base = OTHER; note = thymine
  modified_base 1521: mod_base = OTHER; note = thymine
  modified_base 1526..1527: mod_base = OTHER; note = thymine
  modified_base 1530: mod_base = OTHER; note = thymine
  modified_base 1534: mod_base = OTHER; note = thymine
  modified_base 1536..1539: mod_base = OTHER; note = thymine
  modified_base 1545: mod_base = OTHER; note = thymine
  modified_base 1548: mod_base = OTHER; note = thymine
  modified_base 1556..1557: mod_base = OTHER; note = thymine
  modified_base 1566: mod_base = OTHER; note = thymine
  modified_base 1578: mod_base = OTHER; note = thymine
  modified_base 1581: mod_base = OTHER; note = thymine
  modified_base 1587: mod_base = OTHER; note = thymine
  modified_base 1590: mod_base = OTHER; note = thymine
  modified_base 1599: mod_base = OTHER; note = thymine
  modified_base 1602: mod_base = OTHER; note = thymine
  modified_base 1605: mod_base = OTHER; note = thymine
  modified_base 1609..1611: mod_base = OTHER; note = thymine
  modified_base 1614: mod_base = OTHER; note = thymine
  modified_base 1618: mod_base = OTHER; note = thymine
  modified_base 1620..1623: mod_base = OTHER; note = thymine
  modified_base 1626: mod_base = OTHER; note = thymine
  modified_base 1629..1632: mod_base = OTHER; note = thymine
  modified_base 1634..1635: mod_base = OTHER; note = thymine
  modified_base 1638: mod_base = OTHER; note = thymine
  modified_base 1644: mod_base = OTHER; note = thymine
  modified_base 1648: mod_base = OTHER; note = thymine
  modified_base 1650: mod_base = OTHER; note = thymine
  modified_base 1656: mod_base = OTHER; note = thymine
  modified_base 1658..1659: mod_base = OTHER; note = thymine
  modified_base 1661..1662: mod_base = OTHER; note = thymine
  modified_base 1667..1668: mod_base = OTHER; note = thymine
  modified_base 1671: mod_base = OTHER; note = thymine
  modified_base 1673..1675: mod_base = OTHER; note = thymine
  modified_base 1677: mod_base = OTHER; note = thymine
  modified_base 1689: mod_base = OTHER; note = thymine
  modified_base 1692: mod_base = OTHER; note = thymine
  modified_base 1696: mod_base = OTHER; note = thymine
  modified_base 1698: mod_base = OTHER; note = thymine
  modified_base 1700..1702: mod_base = OTHER; note = thymine
  modified_base 1704..1705: mod_base = OTHER; note = thymine
  modified_base 1707: mod_base = OTHER; note = thymine
  modified_base 1710: mod_base = OTHER; note = thymine
  modified_base 1718..1719: mod_base = OTHER; note = thymine
  modified_base 1722: mod_base = OTHER; note = thymine
  modified_base 1724..1725: mod_base = OTHER; note = thymine
  modified_base 1728: mod_base = OTHER; note = thymine
  modified_base 1731: mod_base = OTHER; note = thymine
  modified_base 1733..1734: mod_base = OTHER; note = thymine
  modified_base 1737: mod_base = OTHER; note = thymine
  modified_base 1746..1747: mod_base = OTHER; note = thymine
  modified_base 1749: mod_base = OTHER; note = thymine
  modified_base 1751..1752: mod_base = OTHER; note = thymine
  modified_base 1757..1758: mod_base = OTHER; note = thymine
  modified_base 1761: mod_base = OTHER; note = thymine
  modified_base 1764: mod_base = OTHER; note = thymine
  modified_base 1767: mod_base = OTHER; note = thymine
  modified_base 1769..1770: mod_base = OTHER; note = thymine
  modified_base 1773..1777: mod_base = OTHER; note = thymine
  modified_base 1779: mod_base = OTHER; note = thymine
  modified_base 1782: mod_base = OTHER; note = thymine
  modified_base 1785..1786: mod_base = OTHER; note = thymine
  modified_base 1791: mod_base = OTHER; note = thymine
  modified_base 1794..1795: mod_base = OTHER; note = thymine
  modified_base 1797..1800: mod_base = OTHER; note = thymine
  modified_base 1803: mod_base = OTHER; note = thymine
  modified_base 1806: mod_base = OTHER; note = thymine
  modified_base 1811..1812: mod_base = OTHER; note = thymine
  modified_base 1814..1815: mod_base = OTHER; note = thymine
  modified_base 1817..1818: mod_base = OTHER; note = thymine
  modified_base 1820..1821: mod_base = OTHER; note = thymine
  modified_base 1824..1825: mod_base = OTHER; note = thymine
  modified_base 1827: mod_base = OTHER; note = thymine
  modified_base 1833: mod_base = OTHER; note = thymine
  modified_base 1839: mod_base = OTHER; note = thymine
  modified_base 1845: mod_base = OTHER; note = thymine
  modified_base 1848: mod_base = OTHER; note = thymine
  modified_base 1854: mod_base = OTHER; note = thymine
  modified_base 1857..1858: mod_base = OTHER; note = thymine
  modified_base 1860: mod_base = OTHER; note = thymine
  modified_base 1864: mod_base = OTHER; note = thymine
  modified_base 1866..1869: mod_base = OTHER; note = thymine
  modified_base 1872: mod_base = OTHER; note = thymine
  modified_base 1875: mod_base = OTHER; note = thymine
  modified_base 1881: mod_base = OTHER; note = thymine
  modified_base 1884..1885: mod_base = OTHER; note = thymine
  modified_base 1887: mod_base = OTHER; note = thymine
  modified_base 1890: mod_base = OTHER; note = thymine
  modified_base 1894: mod_base = OTHER; note = thymine
  modified_base 1903..1905: mod_base = OTHER; note = thymine
  modified_base 1911: mod_base = OTHER; note = thymine
  modified_base 1914: mod_base = OTHER; note = thymine
  modified_base 1916..1917: mod_base = OTHER; note = thymine
  modified_base 1923..1924: mod_base = OTHER; note = thymine
  modified_base 1926: mod_base = OTHER; note = thymine
  modified_base 1929..1932: mod_base = OTHER; note = thymine
  modified_base 1935: mod_base = OTHER; note = thymine
  modified_base 1938..1939: mod_base = OTHER; note = thymine
  modified_base 1941: mod_base = OTHER; note = thymine
  modified_base 1953: mod_base = OTHER; note = thymine
  modified_base 1955..1956: mod_base = OTHER; note = thymine
  modified_base 1958..1959: mod_base = OTHER; note = thymine
  modified_base 1961..1962: mod_base = OTHER; note = thymine
  modified_base 1969..1971: mod_base = OTHER; note = thymine
  modified_base 1974: mod_base = OTHER; note = thymine
  modified_base 1980: mod_base = OTHER; note = thymine
  modified_base 1983..1986: mod_base = OTHER; note = thymine
  modified_base 1995: mod_base = OTHER; note = thymine
  modified_base 1998: mod_base = OTHER; note = thymine
  modified_base 2000..2001: mod_base = OTHER; note = thymine
  modified_base 2004: mod_base = OTHER; note = thymine
  modified_base 2007: mod_base = OTHER; note = thymine
  modified_base 2010: mod_base = OTHER; note = thymine
  modified_base 2013..2014: mod_base = OTHER; note = thymine
  modified_base 2016: mod_base = OTHER; note = thymine
  modified_base 2018..2019: mod_base = OTHER; note = thymine
  modified_base 2022: mod_base = OTHER; note = thymine
  modified_base 2025..2028: mod_base = OTHER; note = thymine
  modified_base 2030..2032: mod_base = OTHER; note = thymine
  modified_base 2034: mod_base = OTHER; note = thymine
  modified_base 2038..2040: mod_base = OTHER; note = thymine
  modified_base 2042..2043: mod_base = OTHER; note = thymine
  modified_base 2046: mod_base = OTHER; note = thymine
  modified_base 2049: mod_base = OTHER; note = thymine
  modified_base 2052: mod_base = OTHER; note = thymine
  modified_base 2054: mod_base = OTHER; note = thymine
  modified_base 2058: mod_base = OTHER; note = thymine
  modified_base 2060..2061: mod_base = OTHER; note = thymine
  modified_base 2064: mod_base = OTHER; note = thymine
  modified_base 2067: mod_base = OTHER; note = thymine
  modified_base 2073: mod_base = OTHER; note = thymine
  modified_base 2082: mod_base = OTHER; note = thymine
  modified_base 2084..2088: mod_base = OTHER; note = thymine
  modified_base 2091..2092: mod_base = OTHER; note = thymine
  modified_base 2094: mod_base = OTHER; note = thymine
  modified_base 2097: mod_base = OTHER; note = thymine
  modified_base 2100: mod_base = OTHER; note = thymine
  modified_base 2105..2106: mod_base = OTHER; note = thymine
  modified_base 2109: mod_base = OTHER; note = thymine
  modified_base 2112: mod_base = OTHER; note = thymine
  modified_base 2114..2115: mod_base = OTHER; note = thymine
  modified_base 2117..2118: mod_base = OTHER; note = thymine
  modified_base 2121: mod_base = OTHER; note = thymine
  modified_base 2124..2128: mod_base = OTHER; note = thymine
  modified_base 2133: mod_base = OTHER; note = thymine
  modified_base 2135..2136: mod_base = OTHER; note = thymine
  modified_base 2139: mod_base = OTHER; note = thymine
  modified_base 2144..2145: mod_base = OTHER; note = thymine
  modified_base 2148: mod_base = OTHER; note = thymine
  modified_base 2151: mod_base = OTHER; note = thymine
  modified_base 2157: mod_base = OTHER; note = thymine
  modified_base 2160: mod_base = OTHER; note = thymine
  modified_base 2163: mod_base = OTHER; note = thymine
  modified_base 2166: mod_base = OTHER; note = thymine
  modified_base 2169: mod_base = OTHER; note = thymine
  modified_base 2172: mod_base = OTHER; note = thymine
  modified_base 2174..2175: mod_base = OTHER; note = thymine
  modified_base 2178: mod_base = OTHER; note = thymine
  modified_base 2181: mod_base = OTHER; note = thymine
  modified_base 2183..2184: mod_base = OTHER; note = thymine
  modified_base 2186..2187: mod_base = OTHER; note = thymine
  modified_base 2189..2190: mod_base = OTHER; note = thymine
  modified_base 2193..2194: mod_base = OTHER; note = thymine
  modified_base 2196..2197: mod_base = OTHER; note = thymine
  modified_base 2199: mod_base = OTHER; note = thymine
  modified_base 2202: mod_base = OTHER; note = thymine
  modified_base 2204..2205: mod_base = OTHER; note = thymine
  modified_base 2208: mod_base = OTHER; note = thymine
  modified_base 2210: mod_base = OTHER; note = thymine
  modified_base 2222..2223: mod_base = OTHER; note = thymine
  modified_base 2226: mod_base = OTHER; note = thymine
  modified_base 2229..2232: mod_base = OTHER; note = thymine
  modified_base 2234..2235: mod_base = OTHER; note = thymine
  modified_base 2238..2239: mod_base = OTHER; note = thymine
  modified_base 2241: mod_base = OTHER; note = thymine
  modified_base 2249: mod_base = OTHER; note = thymine
  modified_base 2253: mod_base = OTHER; note = thymine
  modified_base 2256..2259: mod_base = OTHER; note = thymine
  modified_base 2262: mod_base = OTHER; note = thymine
  modified_base 2265: mod_base = OTHER; note = thymine
  modified_base 2271: mod_base = OTHER; note = thymine
  modified_base 2273..2274: mod_base = OTHER; note = thymine
  modified_base 2277: mod_base = OTHER; note = thymine
  modified_base 2286: mod_base = OTHER; note = thymine
  modified_base 2289: mod_base = OTHER; note = thymine
  modified_base 2294..2295: mod_base = OTHER; note = thymine
  modified_base 2297..2298: mod_base = OTHER; note = thymine
  modified_base 2301: mod_base = OTHER; note = thymine
  modified_base 2310: mod_base = OTHER; note = thymine
  modified_base 2313..2316: mod_base = OTHER; note = thymine
  modified_base 2319: mod_base = OTHER; note = thymine
  modified_base 2325..2326: mod_base = OTHER; note = thymine
  modified_base 2332..2337: mod_base = OTHER; note = thymine
  modified_base 2340: mod_base = OTHER; note = thymine
  modified_base 2348..2349: mod_base = OTHER; note = thymine
  modified_base 2351: mod_base = OTHER; note = thymine
  modified_base 2354..2355: mod_base = OTHER; note = thymine
  modified_base 2358: mod_base = OTHER; note = thymine
  modified_base 2360..2364: mod_base = OTHER; note = thymine
  modified_base 2367: mod_base = OTHER; note = thymine
  modified_base 2373: mod_base = OTHER; note = thymine
  modified_base 2376: mod_base = OTHER; note = thymine
  modified_base 2379: mod_base = OTHER; note = thymine
  modified_base 2385: mod_base = OTHER; note = thymine
  modified_base 2389..2391: mod_base = OTHER; note = thymine
  modified_base 2400: mod_base = OTHER; note = thymine
  modified_base 2403: mod_base = OTHER; note = thymine
  modified_base 2406: mod_base = OTHER; note = thymine
  modified_base 2409: mod_base = OTHER; note = thymine
  modified_base 2417..2418: mod_base = OTHER; note = thymine
  modified_base 2421: mod_base = OTHER; note = thymine
  modified_base 2424: mod_base = OTHER; note = thymine
  modified_base 2426..2427: mod_base = OTHER; note = thymine
  modified_base 2429..2430: mod_base = OTHER; note = thymine
  modified_base 2433: mod_base = OTHER; note = thymine
  modified_base 2441..2443: mod_base = OTHER; note = thymine
  modified_base 2445..2446: mod_base = OTHER; note = thymine
  modified_base 2448: mod_base = OTHER; note = thymine
  modified_base 2451: mod_base = OTHER; note = thymine
  modified_base 2454: mod_base = OTHER; note = thymine
  modified_base 2460: mod_base = OTHER; note = thymine
  modified_base 2462..2463: mod_base = OTHER; note = thymine
  modified_base 2466: mod_base = OTHER; note = thymine
  modified_base 2470: mod_base = OTHER; note = thymine
  modified_base 2472: mod_base = OTHER; note = thymine
  modified_base 2474..2475: mod_base = OTHER; note = thymine
  modified_base 2478: mod_base = OTHER; note = thymine
  modified_base 2481: mod_base = OTHER; note = thymine
  modified_base 2483..2487: mod_base = OTHER; note = thymine
  modified_base 2489..2491: mod_base = OTHER; note = thymine
  modified_base 2493: mod_base = OTHER; note = thymine
  modified_base 2496: mod_base = OTHER; note = thymine
  modified_base 2499: mod_base = OTHER; note = thymine
  modified_base 2502: mod_base = OTHER; note = thymine
  modified_base 2505: mod_base = OTHER; note = thymine
  modified_base 2508: mod_base = OTHER; note = thymine
  modified_base 2513: mod_base = OTHER; note = thymine
  modified_base 2515: mod_base = OTHER; note = thymine
  modified_base 2517: mod_base = OTHER; note = thymine
  modified_base 2520: mod_base = OTHER; note = thymine
  modified_base 2526: mod_base = OTHER; note = thymine
  modified_base 2529: mod_base = OTHER; note = thymine
  modified_base 2531: mod_base = OTHER; note = thymine
  modified_base 2538: mod_base = OTHER; note = thymine
  modified_base 2540..2541: mod_base = OTHER; note = thymine
  modified_base 2545: mod_base = OTHER; note = thymine
  modified_base 2547: mod_base = OTHER; note = thymine
  modified_base 2550: mod_base = OTHER; note = thymine
  modified_base 2556: mod_base = OTHER; note = thymine
  modified_base 2558..2559: mod_base = OTHER; note = thymine
  modified_base 2562: mod_base = OTHER; note = thymine
  modified_base 2568: mod_base = OTHER; note = thymine
  modified_base 2570..2572: mod_base = OTHER; note = thymine
  modified_base 2574: mod_base = OTHER; note = thymine
  modified_base 2576..2577: mod_base = OTHER; note = thymine
  modified_base 2579..2580: mod_base = OTHER; note = thymine
  modified_base 2583: mod_base = OTHER; note = thymine
  modified_base 2585..2586: mod_base = OTHER; note = thymine
  modified_base 2589: mod_base = OTHER; note = thymine
  modified_base 2591..2592: mod_base = OTHER; note = thymine
  modified_base 2595: mod_base = OTHER; note = thymine
  modified_base 2600..2601: mod_base = OTHER; note = thymine
  modified_base 2606..2607: mod_base = OTHER; note = thymine
  modified_base 2613: mod_base = OTHER; note = thymine
  modified_base 2615..2616: mod_base = OTHER; note = thymine
  modified_base 2624: mod_base = OTHER; note = thymine
  modified_base 2627..2628: mod_base = OTHER; note = thymine
  modified_base 2631: mod_base = OTHER; note = thymine
  modified_base 2634: mod_base = OTHER; note = thymine
  modified_base 2640: mod_base = OTHER; note = thymine
  modified_base 2646: mod_base = OTHER; note = thymine
  modified_base 2651..2653: mod_base = OTHER; note = thymine
  modified_base 2655: mod_base = OTHER; note = thymine
  modified_base 2661: mod_base = OTHER; note = thymine
  modified_base 2663..2664: mod_base = OTHER; note = thymine
  modified_base 2670: mod_base = OTHER; note = thymine
  modified_base 2673: mod_base = OTHER; note = thymine
  modified_base 2675..2676: mod_base = OTHER; note = thymine
  modified_base 2682: mod_base = OTHER; note = thymine
  modified_base 2685: mod_base = OTHER; note = thymine
  modified_base 2691: mod_base = OTHER; note = thymine
  modified_base 2694: mod_base = OTHER; note = thymine
  modified_base 2697: mod_base = OTHER; note = thymine
  modified_base 2700: mod_base = OTHER; note = thymine
  modified_base 2706..2709: mod_base = OTHER; note = thymine
  modified_base 2712: mod_base = OTHER; note = thymine
  modified_base 2718..2722: mod_base = OTHER; note = thymine
  modified_base 2724: mod_base = OTHER; note = thymine
  modified_base 2728: mod_base = OTHER; note = thymine
  modified_base 2730: mod_base = OTHER; note = thymine
  modified_base 2733: mod_base = OTHER; note = thymine
  modified_base 2739: mod_base = OTHER; note = thymine
  modified_base 2742: mod_base = OTHER; note = thymine
  modified_base 2745: mod_base = OTHER; note = thymine
  modified_base 2748: mod_base = OTHER; note = thymine
  modified_base 2751: mod_base = OTHER; note = thymine
  modified_base 2759..2760: mod_base = OTHER; note = thymine
  modified_base 2766: mod_base = OTHER; note = thymine
  modified_base 2768..2769: mod_base = OTHER; note = thymine
  modified_base 2772: mod_base = OTHER; note = thymine
  modified_base 2774..2775: mod_base = OTHER; note = thymine
  modified_base 2783..2784: mod_base = OTHER; note = thymine
  modified_base 2793: mod_base = OTHER; note = thymine
  modified_base 2796: mod_base = OTHER; note = thymine
  modified_base 2798..2800: mod_base = OTHER; note = thymine
  modified_base 2804..2805: mod_base = OTHER; note = thymine
  modified_base 2808: mod_base = OTHER; note = thymine
  modified_base 2811: mod_base = OTHER; note = thymine
  modified_base 2814: mod_base = OTHER; note = thymine
  modified_base 2817: mod_base = OTHER; note = thymine
  modified_base 2820: mod_base = OTHER; note = thymine
  modified_base 2822..2823: mod_base = OTHER; note = thymine
  modified_base 2826: mod_base = OTHER; note = thymine
  modified_base 2829: mod_base = OTHER; note = thymine
  modified_base 2832: mod_base = OTHER; note = thymine
  modified_base 2835: mod_base = OTHER; note = thymine
  modified_base 2838: mod_base = OTHER; note = thymine
  modified_base 2840: mod_base = OTHER; note = thymine
  modified_base 2843..2844: mod_base = OTHER; note = thymine
  modified_base 2847: mod_base = OTHER; note = thymine
  modified_base 2849..2850: mod_base = OTHER; note = thymine
  modified_base 2853: mod_base = OTHER; note = thymine
  modified_base 2855..2859: mod_base = OTHER; note = thymine
  modified_base 2868: mod_base = OTHER; note = thymine
  modified_base 2871: mod_base = OTHER; note = thymine
  modified_base 2875: mod_base = OTHER; note = thymine
  modified_base 2877..2878: mod_base = OTHER; note = thymine
  modified_base 2880: mod_base = OTHER; note = thymine
  modified_base 2882..2883: mod_base = OTHER; note = thymine
  modified_base 2885..2886: mod_base = OTHER; note = thymine
  modified_base 2889: mod_base = OTHER; note = thymine
  modified_base 2891..2893: mod_base = OTHER; note = thymine
  modified_base 2895..2896: mod_base = OTHER; note = thymine
  modified_base 2898..2899: mod_base = OTHER; note = thymine
  modified_base 2906..2907: mod_base = OTHER; note = thymine
  modified_base 2910: mod_base = OTHER; note = thymine
  modified_base 2916: mod_base = OTHER; note = thymine
  modified_base 2918..2919: mod_base = OTHER; note = thymine
  modified_base 2921..2922: mod_base = OTHER; note = thymine
  modified_base 2925: mod_base = OTHER; note = thymine
  modified_base 2928: mod_base = OTHER; note = thymine
  modified_base 2931: mod_base = OTHER; note = thymine
  modified_base 2934: mod_base = OTHER; note = thymine
  modified_base 2936..2937: mod_base = OTHER; note = thymine
  modified_base 2939..2940: mod_base = OTHER; note = thymine
  modified_base 2943..2944: mod_base = OTHER; note = thymine
  modified_base 2946: mod_base = OTHER; note = thymine
  modified_base 2949: mod_base = OTHER; note = thymine
  modified_base 2952: mod_base = OTHER; note = thymine
  modified_base 2961..2962: mod_base = OTHER; note = thymine
  modified_base 2967: mod_base = OTHER; note = thymine
  modified_base 2969..2970: mod_base = OTHER; note = thymine
  modified_base 2972..2973: mod_base = OTHER; note = thymine
  modified_base 2976: mod_base = OTHER; note = thymine
  modified_base 2980: mod_base = OTHER; note = thymine
  modified_base 2982..2985: mod_base = OTHER; note = thymine
  modified_base 2988..2991: mod_base = OTHER; note = thymine
  modified_base 2995..2997: mod_base = OTHER; note = thymine
  modified_base 2999..3000: mod_base = OTHER; note = thymine
  modified_base 3002..3004: mod_base = OTHER; note = thymine
  modified_base 3006..3007: mod_base = OTHER; note = thymine
  modified_base 3009: mod_base = OTHER; note = thymine
  modified_base 3012: mod_base = OTHER; note = thymine
  modified_base 3015: mod_base = OTHER; note = thymine
  modified_base 3017..3018: mod_base = OTHER; note = thymine
  modified_base 3020..3021: mod_base = OTHER; note = thymine
  modified_base 3026..3027: mod_base = OTHER; note = thymine
  modified_base 3032..3033: mod_base = OTHER; note = thymine
  modified_base 3042..3043: mod_base = OTHER; note = thymine
  modified_base 3045..3048: mod_base = OTHER; note = thymine
  modified_base 3050..3051: mod_base = OTHER; note = thymine
  modified_base 3054..3055: mod_base = OTHER; note = thymine
  modified_base 3057..3061: mod_base = OTHER; note = thymine
  modified_base 3063: mod_base = OTHER; note = thymine
  modified_base 3066: mod_base = OTHER; note = thymine
  modified_base 3068..3069: mod_base = OTHER; note = thymine
  modified_base 3072: mod_base = OTHER; note = thymine
  modified_base 3075: mod_base = OTHER; note = thymine
  modified_base 3078: mod_base = OTHER; note = thymine
  modified_base 3081: mod_base = OTHER; note = thymine
  modified_base 3084: mod_base = OTHER; note = thymine
  modified_base 3087: mod_base = OTHER; note = thymine
  modified_base 3089..3091: mod_base = OTHER; note = thymine
  modified_base 3093: mod_base = OTHER; note = thymine
  modified_base 3095..3096: mod_base = OTHER; note = thymine
  modified_base 3099: mod_base = OTHER; note = thymine
  modified_base 3105: mod_base = OTHER; note = thymine
  modified_base 3108: mod_base = OTHER; note = thymine
  modified_base 3110..3111: mod_base = OTHER; note = thymine
  modified_base 3118: mod_base = OTHER; note = thymine
  modified_base 3120: mod_base = OTHER; note = thymine
  modified_base 3126: mod_base = OTHER; note = thymine
  modified_base 3132: mod_base = OTHER; note = thymine
  modified_base 3135: mod_base = OTHER; note = thymine
  modified_base 3137: mod_base = OTHER; note = thymine
  modified_base 3141: mod_base = OTHER; note = thymine
  modified_base 3144: mod_base = OTHER; note = thymine
  modified_base 3146..3147: mod_base = OTHER; note = thymine
  modified_base 3150: mod_base = OTHER; note = thymine
  modified_base 3152..3153: mod_base = OTHER; note = thymine
  modified_base 3159: mod_base = OTHER; note = thymine
  modified_base 3162: mod_base = OTHER; note = thymine
  modified_base 3164..3166: mod_base = OTHER; note = thymine
  modified_base 3168..3171: mod_base = OTHER; note = thymine
  modified_base 3178: mod_base = OTHER; note = thymine
  modified_base 3180: mod_base = OTHER; note = thymine
  modified_base 3185..3186: mod_base = OTHER; note = thymine
  modified_base 3189: mod_base = OTHER; note = thymine
  modified_base 3194: mod_base = OTHER; note = thymine
  modified_base 3198: mod_base = OTHER; note = thymine
  modified_base 3206..3207: mod_base = OTHER; note = thymine
  modified_base 3210: mod_base = OTHER; note = thymine
  modified_base 3213..3214: mod_base = OTHER; note = thymine
  modified_base 3216: mod_base = OTHER; note = thymine
  modified_base 3219: mod_base = OTHER; note = thymine
  modified_base 3221..3222: mod_base = OTHER; note = thymine
  modified_base 3231: mod_base = OTHER; note = thymine
  modified_base 3234: mod_base = OTHER; note = thymine
  modified_base 3237: mod_base = OTHER; note = thymine
  modified_base 3239..3240: mod_base = OTHER; note = thymine
  modified_base 3243: mod_base = OTHER; note = thymine
  misc_feature 1..3246: note = Synthetic
  source 1..3246: mol_type = other RNA
atggctgcttttaagcctaatcctattaattatattcttggtcttgctattggtattgcttctgttggttgggctatggttgagattgatgaggaggagaatcctattcgtcttattgatcttggtgttcgtgtttttgagcgtgctgaggttcctaagactggtgattctcttgctatggctcgtcgtcttgctcgttctgttcgtcgtcttactcgtcgtcgtgctcatcgtcttcttcgtgctcgtcgtcttcttaagcgtgagggtgttcttcaggctgctgattttgatgagaatggtcttattaagtctcttcctaatactccttggcagcttcgtgctgctgctcttgatcgtaagcttactcctcttgagtggtctgctgttcttcttcatcttattaagcatcgtggttatctttctcagcgtaagaatgagggtgagactgctgataaggagcttggtgctcttcttaagggtgttgctgataatgctcatgctcttcagactggtgattttcgtactcctgctgagcttgctcttaataagtttgagaaggagtgtggtcatattcgtaatcagcgtggtgattattctcatactttttctcgtaaggatcttcaggctgagcttaatcttctttttgagaagcagaaggagtttggtaatcctcatgtttctggtggtcttaaggagggtattgagactcttcttatgactcagcgtcctgctctttctggtgatgctgttcagaagatgcttggtcattgtacttttgagcctgctgagcctaaggctgctaagaatacttatactgctgagcgttttatttggcttactaagcttaataatcttcgtattcttgagcagggttctgagcgtcctcttactgatactgagcgtgctactcttatggatgagccttatcgtaagtctaagcttacttatgctcaggctcgtaagcttctttctcttgaggatactgctttttttaagggtcttcgttatggtaaggataatgctgaggcttctactcttatggagatgaaggcttatcatactatttctcgtgctcttgagaaggagggtcttaaggataagaagtctcctcttaatctttctcctgagcttcaggatgagattggtactgctttttctctttttaagactgatgaggatattactggtcgtcttaaggatcgtattcagcctgagattcttgaggctcttcttaagcatatttcttttgataagtttgttcagatttctcttaaggctcttcgtcgtattgttcctcttatggagcagggtaagcgttatgatgaggcttgtgctgagatttatggtgatcattatggtaagaagaatactgaggagaagatttatcttcctcctattcctgctgatgagattcgtaatcctgttgttcttcgtgctctttctcaggctcgtaaggttattaatggtgttgttcgtcgttatggttctcctgctcgtattcatattgagactgctcgtgaggttggtaagtcttttaaggatcgtaaggagattgagaagcgtcaggaggagaatcgtaaggatcgtgagaaggctgctgctaagtttcgtgagtattttcctaattttgttggtgagcctaagtctaaggatattcttaagcttcgtctttatgagcagcagcatggtaagtgtctttattctggtaaggagattaatcttggtcgtcttaatgagaagggttatgttgagattgatcatgctcttcctttttctcgtacttgggatgattcttttaataataaggttcttgttcttggttctgagaatcagaataagggtaatcagactccttatgagtattttaatggtaaggataattctcgtgagtggcaggagtttaaggctcgtgttgagacttctcgttttcctcgttctaagaagcagcgtattcttcttcagaagtttgatgaggatggttttaaggagcgtaatcttaatgatactcgttatgttaatcgttttctttgtcagtttgttgctgatcgtatgcgtcttactggtaagggtaagaagcgtgtttttgcttctaatggtcagattactaatcttcttcgtggtttttggggtcttcgtaaggttcgtgctgagaatgatcgtcatcatgctcttgatgctgttgttgttgcttgttctactgttgctatgcagcagaagattactcgttttgttcgttataaggagatgaatgcttttgatggtaagactattgataaggagactggtgaggttcttcatcagaagactcattttcctcagccttgggagttttttgctcaggaggttatgattcgtgtttttggtaagcctgatggtaagcctgagtttgaggaggctgatactcctgagaagcttcgtactcttcttgctgagaagctttcttctcgtcctgaggctgttcatgagtatgttactcctctttttgtttctcgtgctcctaatcgtaagatgtctggtcagggtcatatggagactgttaagtctgctaagcgtcttgatgagggtgtttctgttcttcgtgttcctcttactcagcttaagcttaaggatcttgagaagatggttaatcgtgagcgtgagcctaagctttatgaggctcttaaggctcgtcttgaggctcataaggatgatcctgctaaggcttttgctgagcctttttataagtatgataaggctggtaatcgtactcagcaggttaaggctgttcgtgttgagcaggttcagaagactggtgtttgggttcgtaatcataatggtattgctgataatgctactatggttcgtgttgatgtttttgagaagggtgataagtattatcttgttcctatttattcttggcaggttgctaagggtattcttcctgatcgtgctgttgttgcttatgctgatgaggaggattggactgttattgatgagtcttttcgttttaagtttgttctttattctaatgatcttattaaggttcagcttaagaaggattcttttcttggttatttttctggtcttgatcgtgctactggtgctatttctcttcgtgagcatgatcttgagaagtctaagggtaaggatggtatgcatcgtattggtgttaagactgctctttcttttcagaagtatcagattgatgagatgggtaaggagattcgtccttgtcgtcttaagaagcgtcctcctgttcgttaa

SEQ ID NO: 295 - RNA, 3246 nt, synthetic construct
  modified_base 2: mod_base = OTHER; note = thymine
  modified_base 10..11: mod_base = OTHER; note = thymine
  modified_base 26: mod_base = OTHER; note = thymine
  modified_base 31: mod_base = OTHER; note = thymine
  modified_base 35: mod_base = OTHER; note = thymine
  modified_base 38: mod_base = OTHER; note = thymine
  modified_base 44: mod_base = OTHER; note = thymine
  modified_base 50: mod_base = OTHER; note = thymine
  modified_base 56: mod_base = OTHER; note = thymine
  modified_base 61: mod_base = OTHER; note = thymine
  modified_base 65: mod_base = OTHER; note = thymine
  modified_base 70: mod_base = OTHER; note = thymine
  modified_base 77: mod_base = OTHER; note = thymine
  modified_base 80: mod_base = OTHER; note = thymine
  modified_base 86: mod_base = OTHER; note = thymine
  modified_base 107: mod_base = OTHER; note = thymine
  modified_base 113: mod_base = OTHER; note = thymine
  modified_base 116: mod_base = OTHER; note = thymine
  modified_base 122: mod_base = OTHER; note = thymine
  modified_base 128: mod_base = OTHER; note = thymine
  modified_base 134: mod_base = OTHER; note = thymine
  modified_base 136..137: mod_base = OTHER; note = thymine
  modified_base 152: mod_base = OTHER; note = thymine
  modified_base 169: mod_base = OTHER; note = thymine
  modified_base 173: mod_base = OTHER; note = thymine
  modified_base 179: mod_base = OTHER; note = thymine
  modified_base 191: mod_base = OTHER; note = thymine
  modified_base 199: mod_base = OTHER; note = thymine
  modified_base 203: mod_base = OTHER; note = thymine
  modified_base 212: mod_base = OTHER; note = thymine
  modified_base 236: mod_base = OTHER; note = thymine
  modified_base 239: mod_base = OTHER; note = thymine
  modified_base 254: mod_base = OTHER; note = thymine
  modified_base 257: mod_base = OTHER; note = thymine
  modified_base 272: mod_base = OTHER; note = thymine
  modified_base 275: mod_base = OTHER; note = thymine
  modified_base 289..290: mod_base = OTHER; note = thymine
  modified_base 305: mod_base = OTHER; note = thymine
  modified_base 308: mod_base = OTHER; note = thymine
  modified_base 313: mod_base = OTHER; note = thymine
  modified_base 317: mod_base = OTHER; note = thymine
  modified_base 331: mod_base = OTHER; note = thymine
  modified_base 338: mod_base = OTHER; note = thymine
  modified_base 353: mod_base = OTHER; note = thymine
  modified_base 365: mod_base = OTHER; note = thymine
  modified_base 374: mod_base = OTHER; note = thymine
  modified_base 379: mod_base = OTHER; note = thymine
  modified_base 382: mod_base = OTHER; note = thymine
  modified_base 389: mod_base = OTHER; note = thymine
  modified_base 392: mod_base = OTHER; note = thymine
  modified_base 395: mod_base = OTHER; note = thymine
  modified_base 401: mod_base = OTHER; note = thymine
  modified_base 404: mod_base = OTHER; note = thymine
  modified_base 418: mod_base = OTHER; note = thymine
  modified_base 422: mod_base = OTHER; note = thymine
  modified_base 424: mod_base = OTHER; note = thymine
  modified_base 464: mod_base = OTHER; note = thymine
  modified_base 473: mod_base = OTHER; note = thymine
  modified_base 476: mod_base = OTHER; note = thymine
  modified_base 485: mod_base = OTHER; note = thymine
  modified_base 506: mod_base = OTHER; note = thymine
  modified_base 520..521: mod_base = OTHER; note = thymine
  modified_base 539: mod_base = OTHER; note = thymine
  modified_base 545: mod_base = OTHER; note = thymine
  modified_base 553..554: mod_base = OTHER; note = thymine
  modified_base 565: mod_base = OTHER; note = thymine
  modified_base 575: mod_base = OTHER; note = thymine
  modified_base 595: mod_base = OTHER; note = thymine
  modified_base 598: mod_base = OTHER; note = thymine
  modified_base 607..608: mod_base = OTHER; note = thymine
  modified_base 610: mod_base = OTHER; note = thymine
  modified_base 623: mod_base = OTHER; note = thymine
  modified_base 635: mod_base = OTHER; note = thymine
  modified_base 641: mod_base = OTHER; note = thymine
  modified_base 644: mod_base = OTHER; note = thymine
  modified_base 646..647: mod_base = OTHER; note = thymine
  modified_base 664..665: mod_base = OTHER; note = thymine
  modified_base 680: mod_base = OTHER; note = thymine
  modified_base 682: mod_base = OTHER; note = thymine
  modified_base 692: mod_base = OTHER; note = thymine
  modified_base 704: mod_base = OTHER; note = thymine
  modified_base 713: mod_base = OTHER; note = thymine
  modified_base 716: mod_base = OTHER; note = thymine
  modified_base 719: mod_base = OTHER; note = thymine
  modified_base 737: mod_base = OTHER; note = thymine
  modified_base 739: mod_base = OTHER; note = thymine
  modified_base 752: mod_base = OTHER; note = thymine
  modified_base 761: mod_base = OTHER; note = thymine
  modified_base 764: mod_base = OTHER; note = thymine
  modified_base 772: mod_base = OTHER; note = thymine
  modified_base 778..779: mod_base = OTHER; note = thymine
  modified_base 814: mod_base = OTHER; note = thymine
  modified_base 829..830: mod_base = OTHER; note = thymine
  modified_base 833: mod_base = OTHER; note = thymine
  modified_base 835: mod_base = OTHER; note = thymine
  modified_base 839: mod_base = OTHER; note = thymine
  modified_base 848: mod_base = OTHER; note = thymine
  modified_base 857: mod_base = OTHER; note = thymine
  modified_base 863: mod_base = OTHER; note = thymine
  modified_base 866: mod_base = OTHER; note = thymine
  modified_base 877: mod_base = OTHER; note = thymine
  modified_base 890: mod_base = OTHER; note = thymine
  modified_base 914: mod_base = OTHER; note = thymine
  modified_base 917: mod_base = OTHER; note = thymine
  modified_base 928: mod_base = OTHER; note = thymine
  modified_base 937: mod_base = OTHER; note = thymine
  modified_base 944: mod_base = OTHER; note = thymine
  modified_base 949: mod_base = OTHER; note = thymine
  modified_base 968: mod_base = OTHER; note = thymine
  modified_base 971: mod_base = OTHER; note = thymine
  modified_base 973: mod_base = OTHER; note = thymine
  modified_base 977: mod_base = OTHER; note = thymine
  modified_base 991..992: mod_base = OTHER; note = thymine
  modified_base 994..995: mod_base = OTHER; note = thymine
  modified_base 1004: mod_base = OTHER; note = thymine
  modified_base 1009: mod_base = OTHER; note = thymine
  modified_base 1033: mod_base = OTHER; note = thymine
  modified_base 1040: mod_base = OTHER; note = thymine
  modified_base 1043: mod_base = OTHER; note = thymine
  modified_base 1049: mod_base = OTHER; note = thymine
  modified_base 1057: mod_base = OTHER; note = thymine
  modified_base 1067: mod_base = OTHER; note = thymine
  modified_base 1069: mod_base = OTHER; note = thymine
  modified_base 1079: mod_base = OTHER; note = thymine
  modified_base 1094: mod_base = OTHER; note = thymine
  modified_base 1108: mod_base = OTHER; note = thymine
  modified_base 1115: mod_base = OTHER; note = thymine
  modified_base 1121: mod_base = OTHER; note = thymine
  modified_base 1123: mod_base = OTHER; note = thymine
  modified_base 1133: mod_base = OTHER; note = thymine
  modified_base 1145: mod_base = OTHER; note = thymine
  modified_base 1156..1157: mod_base = OTHER; note = thymine
  modified_base 1159: mod_base = OTHER; note = thymine
  modified_base 1163: mod_base = OTHER; note = thymine
  modified_base 1165..1166: mod_base = OTHER; note = thymine
  modified_base 1184: mod_base = OTHER; note = thymine
  modified_base 1196: mod_base = OTHER; note = thymine
  modified_base 1208: mod_base = OTHER; note = thymine
  modified_base 1220: mod_base = OTHER; note = thymine
  modified_base 1223: mod_base = OTHER; note = thymine
  modified_base 1232: mod_base = OTHER; note = thymine
  modified_base 1235: mod_base = OTHER; note = thymine
  modified_base 1244: mod_base = OTHER; note = thymine
  modified_base 1246: mod_base = OTHER; note = thymine
  modified_base 1249..1250: mod_base = OTHER; note = thymine
  modified_base 1258..1259: mod_base = OTHER; note = thymine
  modified_base 1262: mod_base = OTHER; note = thymine
  modified_base 1268: mod_base = OTHER; note = thymine
  modified_base 1270: mod_base = OTHER; note = thymine
  modified_base 1274: mod_base = OTHER; note = thymine
  modified_base 1283: mod_base = OTHER; note = thymine
  modified_base 1292: mod_base = OTHER; note = thymine
  modified_base 1295: mod_base = OTHER; note = thymine
  modified_base 1301: mod_base = OTHER; note = thymine
  modified_base 1304: mod_base = OTHER; note = thymine
  modified_base 1321: mod_base = OTHER; note = thymine
  modified_base 1333: mod_base = OTHER; note = thymine
  modified_base 1343: mod_base = OTHER; note = thymine
  modified_base 1345: mod_base = OTHER; note = thymine
  modified_base 1357: mod_base = OTHER; note = thymine
  modified_base 1385: mod_base = OTHER; note = thymine
  modified_base 1387: mod_base = OTHER; note = thymine
  modified_base 1391: mod_base = OTHER; note = thymine
  modified_base 1400: mod_base = OTHER; note = thymine
  modified_base 1415: mod_base = OTHER; note = thymine
  modified_base 1427: mod_base = OTHER; note = thymine
  modified_base 1430: mod_base = OTHER; note = thymine
  modified_base 1433: mod_base = OTHER; note = thymine
  modified_base 1442: mod_base = OTHER; note = thymine
  modified_base 1444: mod_base = OTHER; note = thymine
  modified_base 1460: mod_base = OTHER; note = thymine
  modified_base 1463: mod_base = OTHER; note = thymine
  modified_base 1472: mod_base = OTHER; note = thymine
  modified_base 1475: mod_base = OTHER; note = thymine
  modified_base 1483: mod_base = OTHER; note = thymine
  modified_base 1489: mod_base = OTHER; note = thymine
  modified_base 1502: mod_base = OTHER; note = thymine
  modified_base 1508: mod_base = OTHER; note = thymine
  modified_base 1526: mod_base = OTHER; note = thymine
  modified_base 1534: mod_base = OTHER; note = thymine
  modified_base 1537..1538: mod_base = OTHER; note = thymine
  modified_base 1556: mod_base = OTHER; note = thymine
  modified_base 1609..1610: mod_base = OTHER; note = thymine
  modified_base 1618: mod_base = OTHER; note = thymine
  modified_base 1621..1622: mod_base = OTHER; note = thymine
  modified_base 1630..1631: mod_base = OTHER; note = thymine
  modified_base 1634: mod_base = OTHER; note = thymine
  modified_base 1648: mod_base = OTHER; note = thymine
  modified_base 1658: mod_base = OTHER; note = thymine
  modified_base 1661: mod_base = OTHER; note = thymine
  modified_base 1667: mod_base = OTHER; note = thymine
  modified_base 1673: mod_base = OTHER; note = thymine
  modified_base 1675: mod_base = OTHER; note = thymine
  modified_base 1696: mod_base = OTHER; note = thymine
  modified_base 1700: mod_base = OTHER; note = thymine
  modified_base 1702: mod_base = OTHER; note = thymine
  modified_base 1705: mod_base = OTHER; note = thymine
  modified_base 1718: mod_base = OTHER; note = thymine
  modified_base 1724: mod_base = OTHER; note = thymine
  modified_base 1733: mod_base = OTHER; note = thymine
  modified_base 1747: mod_base = OTHER; note = thymine
  modified_base 1751: mod_base = OTHER; note = thymine
  modified_base 1757: mod_base = OTHER; note = thymine
  modified_base 1769: mod_base = OTHER; note = thymine
  modified_base 1774..1775: mod_base = OTHER; note = thymine
  modified_base 1777: mod_base = OTHER; note = thymine
  modified_base 1786: mod_base = OTHER; note = thymine
  modified_base 1795: mod_base = OTHER; note = thymine
  modified_base 1798..1799: mod_base = OTHER; note = thymine
  modified_base 1811: mod_base = OTHER; note = thymine
  modified_base 1814: mod_base = OTHER; note = thymine
  modified_base 1817: mod_base = OTHER; note = thymine
  modified_base 1820: mod_base = OTHER; note = thymine
  modified_base 1825: mod_base = OTHER; note = thymine
  modified_base 1858: mod_base = OTHER; note = thymine
  modified_base 1864: mod_base = OTHER; note = thymine
  modified_base 1867..1868: mod_base = OTHER; note = thymine
  modified_base 1885: mod_base = OTHER; note = thymine
  modified_base 1894: mod_base = OTHER; note = thymine
  modified_base 1903..1904: mod_base = OTHER; note = thymine
  modified_base 1916: mod_base = OTHER; note = thymine
  modified_base 1924: mod_base = OTHER; note = thymine
  modified_base 1930..1931: mod_base = OTHER; note = thymine
  modified_base 1939: mod_base = OTHER; note = thymine
  modified_base 1955: mod_base = OTHER; note = thymine
  modified_base 1958: mod_base = OTHER; note = thymine
  modified_base 1961: mod_base = OTHER; note = thymine
  modified_base 1969..1970: mod_base = OTHER; note = thymine
  modified_base 1984..1985: mod_base = OTHER; note = thymine
  modified_base 2000: mod_base = OTHER; note = thymine
  modified_base 2014: mod_base = OTHER; note = thymine
  modified_base 2018: mod_base = OTHER; note = thymine
  modified_base 2026..2027: mod_base = OTHER; note = thymine
  modified_base 2030: mod_base = OTHER; note = thymine
  modified_base 2032: mod_base = OTHER; note = thymine
  modified_base 2038..2039: mod_base = OTHER; note = thymine
  modified_base 2042: mod_base = OTHER; note = thymine
  modified_base 2054: mod_base = OTHER; note = thymine
  modified_base 2060: mod_base = OTHER; note = thymine
  modified_base 2084: mod_base = OTHER; note = thymine
  modified_base 2086..2087: mod_base = OTHER; note = thymine
  modified_base 2092: mod_base = OTHER; note = thymine
  modified_base 2105: mod_base = OTHER; note = thymine
  modified_base 2114: mod_base = OTHER; note = thymine
  modified_base 2117: mod_base = OTHER; note = thymine
  modified_base 2125..2126: mod_base = OTHER; note = thymine
  modified_base 2128: mod_base = OTHER; note = thymine
  modified_base 2135: mod_base = OTHER; note = thymine
  modified_base 2144: mod_base = OTHER; note = thymine
  modified_base 2174: mod_base = OTHER; note = thymine
  modified_base 2183: mod_base = OTHER; note = thymine
  modified_base 2186: mod_base = OTHER; note = thymine
  modified_base 2189: mod_base = OTHER; note = thymine
  modified_base 2194: mod_base = OTHER; note = thymine
  modified_base 2197: mod_base = OTHER; note = thymine
  modified_base 2204: mod_base = OTHER; note = thymine
  modified_base 2210: mod_base = OTHER; note = thymine
  modified_base 2222: mod_base = OTHER; note = thymine
  modified_base 2230..2231: mod_base = OTHER; note = thymine
  modified_base 2234: mod_base = OTHER; note = thymine
  modified_base 2239: mod_base = OTHER; note = thymine
  modified_base 2249: mod_base = OTHER; note = thymine
  modified_base 2257..2258: mod_base = OTHER; note = thymine
  modified_base 2273: mod_base = OTHER; note = thymine
  modified_base 2294: mod_base = OTHER; note = thymine
  modified_base 2297: mod_base = OTHER; note = thymine
  modified_base 2314..2315: mod_base = OTHER; note = thymine
  modified_base 2326: mod_base = OTHER; note = thymine
  modified_base 2332..2333: mod_base = OTHER; note = thymine
  modified_base 2335..2336: mod_base = OTHER; note = thymine
  modified_base 2348: mod_base = OTHER; note = thymine
  modified_base 2351: mod_base = OTHER; note = thymine
  modified_base 2354: mod_base = OTHER; note = thymine
  modified_base 2360: mod_base = OTHER; note = thymine
  modified_base 2362..2363: mod_base = OTHER; note = thymine
  modified_base 2389..2390: mod_base = OTHER; note = thymine
  modified_base 2417: mod_base = OTHER; note = thymine
  modified_base 2426: mod_base = OTHER; note = thymine
  modified_base 2429: mod_base = OTHER; note = thymine
  modified_base 2441: mod_base = OTHER; note = thymine
  modified_base 2443: mod_base = OTHER; note = thymine
  modified_base 2446: mod_base = OTHER; note = thymine
  modified_base 2462: mod_base = OTHER; note = thymine
  modified_base 2470: mod_base = OTHER; note = thymine
  modified_base 2474: mod_base = OTHER; note = thymine
  modified_base 2483: mod_base = OTHER; note = thymine
  modified_base 2485..2486: mod_base = OTHER; note = thymine
  modified_base 2489: mod_base = OTHER; note = thymine
  modified_base 2491: mod_base = OTHER; note = thymine
  modified_base 2513: mod_base = OTHER; note = thymine
  modified_base 2515: mod_base = OTHER; note = thymine
  modified_base 2531: mod_base = OTHER; note = thymine
  modified_base 2540: mod_base = OTHER; note = thymine
  modified_base 2545: mod_base = OTHER; note = thymine
  modified_base 2558: mod_base = OTHER; note = thymine
  modified_base 2570: mod_base = OTHER; note = thymine
  modified_base 2572: mod_base = OTHER; note = thymine
  modified_base 2576: mod_base = OTHER; note = thymine
  modified_base 2579: mod_base = OTHER; note = thymine
  modified_base 2585: mod_base = OTHER; note = thymine
  modified_base 2591: mod_base = OTHER; note = thymine
  modified_base 2600: mod_base = OTHER; note = thymine
  modified_base 2606: mod_base = OTHER; note = thymine
  modified_base 2615: mod_base = OTHER; note = thymine
  modified_base 2624: mod_base = OTHER; note = thymine
  modified_base 2627: mod_base = OTHER; note = thymine
  modified_base 2651: mod_base = OTHER; note = thymine
  modified_base 2653: mod_base = OTHER; note = thymine
  modified_base 2663: mod_base = OTHER; note = thymine
  modified_base 2675: mod_base = OTHER; note = thymine
  modified_base 2707..2708: mod_base = OTHER; note = thymine
  modified_base 2719..2720: mod_base = OTHER; note = thymine
  modified_base 2722: mod_base = OTHER; note = thymine
  modified_base 2728: mod_base = OTHER; note = thymine
  modified_base 2759: mod_base = OTHER; note = thymine
  modified_base 2768: mod_base = OTHER; note = thymine
  modified_base 2774: mod_base = OTHER; note = thymine
  modified_base 2783: mod_base = OTHER; note = thymine
  modified_base 2798: mod_base = OTHER; note = thymine
  modified_base 2800: mod_base = OTHER; note = thymine
  modified_base 2804: mod_base = OTHER; note = thymine
  modified_base 2822: mod_base = OTHER; note = thymine
  modified_base 2840: mod_base = OTHER; note = thymine
  modified_base 2843: mod_base = OTHER; note = thymine
  modified_base 2849: mod_base = OTHER; note = thymine
  modified_base 2855: mod_base = OTHER; note = thymine
  modified_base 2857..2858: mod_base = OTHER; note = thymine
  modified_base 2875: mod_base = OTHER; note = thymine
  modified_base 2878: mod_base = OTHER; note = thymine
  modified_base 2882: mod_base = OTHER; note = thymine
  modified_base 2885: mod_base = OTHER; note = thymine
  modified_base 2891: mod_base = OTHER; note = thymine
  modified_base 2893: mod_base = OTHER; note = thymine
  modified_base 2896: mod_base = OTHER; note = thymine
  modified_base 2899: mod_base = OTHER; note = thymine
  modified_base 2906: mod_base = OTHER; note = thymine
  modified_base 2918: mod_base = OTHER; note = thymine
  modified_base 2921: mod_base = OTHER; note = thymine
  modified_base 2936: mod_base = OTHER; note = thymine
  modified_base 2939: mod_base = OTHER; note = thymine
  modified_base 2944: mod_base = OTHER; note = thymine
  modified_base 2962: mod_base = OTHER; note = thymine
  modified_base 2969: mod_base = OTHER; note = thymine
  modified_base 2972: mod_base = OTHER; note = thymine
  modified_base 2980: mod_base = OTHER; note = thymine
  modified_base 2983..2984: mod_base = OTHER; note = thymine
  modified_base 2989..2990: mod_base = OTHER; note = thymine
  modified_base 2995..2996: mod_base = OTHER; note = thymine
  modified_base 2999: mod_base = OTHER; note = thymine
  modified_base 3002: mod_base = OTHER; note = thymine
  modified_base 3004: mod_base = OTHER; note = thymine
  modified_base 3007: mod_base = OTHER; note = thymine
  modified_base 3017: mod_base = OTHER; note = thymine
  modified_base 3020: mod_base = OTHER; note = thymine
  modified_base 3026: mod_base = OTHER; note = thymine
  modified_base 3032: mod_base = OTHER; note = thymine
  modified_base 3043: mod_base = OTHER; note = thymine
  modified_base 3046..3047: mod_base = OTHER; note = thymine
  modified_base 3050: mod_base = OTHER; note = thymine
  modified_base 3055: mod_base = OTHER; note = thymine
  modified_base 3058..3059: mod_base = OTHER; note = thymine
  modified_base 3061: mod_base = OTHER; note = thymine
  modified_base 3068: mod_base = OTHER; note = thymine
  modified_base 3089: mod_base = OTHER; note = thymine
  modified_base 3091: mod_base = OTHER; note = thymine
  modified_base 3095: mod_base = OTHER; note = thymine
  modified_base 3110: mod_base = OTHER; note = thymine
  modified_base 3118: mod_base = OTHER; note = thymine
  modified_base 3137: mod_base = OTHER; note = thymine
  modified_base 3146: mod_base = OTHER; note = thymine
  modified_base 3152: mod_base = OTHER; note = thymine
  modified_base 3164: mod_base = OTHER; note = thymine
  modified_base 3166: mod_base = OTHER; note = thymine
  modified_base 3169..3170: mod_base = OTHER; note = thymine
  modified_base 3178: mod_base = OTHER; note = thymine
  modified_base 3185: mod_base = OTHER; note = thymine
  modified_base 3194: mod_base = OTHER; note = thymine
  modified_base 3206: mod_base = OTHER; note = thymine
  modified_base 3214: mod_base = OTHER; note = thymine
  modified_base 3221: mod_base = OTHER; note = thymine
  modified_base 3239: mod_base = OTHER; note = thymine
  misc_feature 1..3246: note = Synthetic
  source 1..3246: mol_type = other RNA
atggccgccttcaagcccaaccccatcaactacatcctgggcctggccatcggcatcgcctccgtgggctgggccatggtggagatcgacgaggaggagaaccccatccggctgatcgacctgggcgtgcgggtgttcgagcgggccgaggtgcccaagaccggcgactccctggccatggcccggcggctggcccggtccgtgcggcggctgacccggcggcgggcccaccggctgctgcgggcccggcggctgctgaagcgggagggcgtgctgcaggccgccgacttcgacgagaacggcctgatcaagtccctgcccaacaccccctggcagctgcgggccgccgccctggaccggaagctgacccccctggagtggtccgccgtgctgctgcacctgatcaagcaccggggctacctgtcccagcggaagaacgagggcgagaccgccgacaaggagctgggcgccctgctgaagggcgtggccgacaacgcccacgccctgcagaccggcgacttccggacccccgccgagctggccctgaacaagttcgagaaggagtgcggccacatccggaaccagcggggcgactactcccacaccttctcccggaaggacctgcaggccgagctgaacctgctgttcgagaagcagaaggagttcggcaacccccacgtgtccggcggcctgaaggagggcatcgagaccctgctgatgacccagcggcccgccctgtccggcgacgccgtgcagaagatgctgggccactgcaccttcgagcccgccgagcccaaggccgccaagaacacctacaccgccgagcggttcatctggctgaccaagctgaacaacctgcggatcctggagcagggctccgagcggcccctgaccgacaccgagcgggccaccctgatggacgagccctaccggaagtccaagctgacctacgcccaggcccggaagctgctgtccctggaggacaccgccttcttcaagggcctgcggtacggcaaggacaacgccgaggcctccaccctgatggagatgaaggcctaccacaccatctcccgggccctggagaaggagggcctgaaggacaagaagtcccccctgaacctgtcccccgagctgcaggacgagatcggcaccgccttctccctgttcaagaccgacgaggacatcaccggccggctgaaggaccggatccagcccgagatcctggaggccctgctgaagcacatctccttcgacaagttcgtgcagatctccctgaaggccctgcggcggatcgtgcccctgatggagcagggcaagcggtacgacgaggcctgcgccgagatctacggcgaccactacggcaagaagaacaccgaggagaagatctacctgccccccatccccgccgacgagatccggaaccccgtggtgctgcgggccctgtcccaggcccggaaggtgatcaacggcgtggtgcggcggtacggctcccccgcccggatccacatcgagaccgcccgggaggtgggcaagtccttcaaggaccggaaggagatcgagaagcggcaggaggagaaccggaaggaccgggagaaggccgccgccaagttccgggagtacttccccaacttcgtgggcgagcccaagtccaaggacatcctgaagctgcggctgtacgagcagcagcacggcaagtgcctgtactccggcaaggagatcaacctgggccggctgaacgagaagggctacgtggagatcgaccacgccctgcccttctcccggacctgggacgactccttcaacaacaaggtgctggtgctgggctccgagaaccagaacaagggcaaccagaccccctacgagtacttcaacggcaaggacaactcccgggagtggcaggagttcaaggcccgggtggagacctcccggttcccccggtccaagaagcagcggatcctgctgcagaagttcgacgaggacggcttcaaggagcggaacctgaacgacacccggtacgtgaaccggttcctgtgccagttcgtggccgaccggatgcggctgaccggcaagggcaagaagcgggtgttcgcctccaacggccagatcaccaacctgctgcggggcttctggggcctgcggaaggtgcgggccgagaacgaccggcaccacgccctggacgccgtggtggtggcctgctccaccgtggccatgcagcagaagatcacccggttcgtgcggtacaaggagatgaacgccttcgacggcaagaccatcgacaaggagaccggcgaggtgctgcaccagaagacccacttcccccagccctgggagttcttcgcccaggaggtgatgatccgggtgttcggcaagcccgacggcaagcccgagttcgaggaggccgacacccccgagaagctgcggaccctgctggccgagaagctgtcctcccggcccgaggccgtgcacgagtacgtgacccccctgttcgtgtcccgggcccccaaccggaagatgtccggccagggccacatggagaccgtgaagtccgccaagcggctggacgagggcgtgtccgtgctgcgggtgcccctgacccagctgaagctgaaggacctggagaagatggtgaaccgggagcgggagcccaagctgtacgaggccctgaaggcccggctggaggcccacaaggacgaccccgccaaggccttcgccgagcccttctacaagtacgacaaggccggcaaccggacccagcaggtgaaggccgtgcgggtggagcaggtgcagaagaccggcgtgtgggtgcggaaccacaacggcatcgccgacaacgccaccatggtgcgggtggacgtgttcgagaagggcgacaagtactacctggtgcccatctactcctggcaggtggccaagggcatcctgcccgaccgggccgtggtggcctacgccgacgaggaggactggaccgtgatcgacgagtccttccggttcaagttcgtgctgtactccaacgacctgatcaaggtgcagctgaagaaggactccttcctgggctacttctccggcctggaccgggccaccggcgccatctccctgcgggagcacgacctggagaagtccaagggcaaggacggcatgcaccggatcggcgtgaagaccgccctgtccttccagaagtaccagatcgacgagatgggcaaggagatccggccctgccggctgaagaagcggccccccgtgcggtga

SEQ ID NO: 296 - RNA, 3246 nt, synthetic construct
  modified_base 2: mod_base = OTHER; note = thymine
  modified_base 10..11: mod_base = OTHER; note = thymine
  modified_base 26: mod_base = OTHER; note = thymine
  modified_base 31: mod_base = OTHER; note = thymine
  modified_base 35: mod_base = OTHER; note = thymine
  modified_base 38: mod_base = OTHER; note = thymine
  modified_base 44: mod_base = OTHER; note = thymine
  modified_base 50: mod_base = OTHER; note = thymine
  modified_base 56: mod_base = OTHER; note = thymine
  modified_base 61: mod_base = OTHER; note = thymine
  modified_base 65: mod_base = OTHER; note = thymine
  modified_base 70: mod_base = OTHER; note = thymine
  modified_base 77: mod_base = OTHER; note = thymine
  modified_base 80: mod_base = OTHER; note = thymine
  modified_base 86: mod_base = OTHER; note = thymine
  modified_base 107: mod_base = OTHER; note = thymine
  modified_base 113: mod_base = OTHER; note = thymine
  modified_base 116: mod_base = OTHER; note = thymine
  modified_base 122: mod_base = OTHER; note = thymine
  modified_base 128: mod_base = OTHER; note = thymine
  modified_base 134: mod_base = OTHER; note = thymine
  modified_base 136..137: mod_base = OTHER; note = thymine
  modified_base 152: mod_base = OTHER; note = thymine
  modified_base 169: mod_base = OTHER; note = thymine
  modified_base 173: mod_base = OTHER; note = thymine
  modified_base 179: mod_base = OTHER; note = thymine
  modified_base 191: mod_base = OTHER; note = thymine
  modified_base 199: mod_base = OTHER; note = thymine
  modified_base 203: mod_base = OTHER; note = thymine
  modified_base 212: mod_base = OTHER; note = thymine
  modified_base 236: mod_base = OTHER; note = thymine
  modified_base 239: mod_base = OTHER; note = thymine
  modified_base 254: mod_base = OTHER; note = thymine
  modified_base 257: mod_base = OTHER; note = thymine
  modified_base 272: mod_base = OTHER; note = thymine
  modified_base 275: mod_base = OTHER; note = thymine
  modified_base 289..290: mod_base = OTHER; note = thymine
  modified_base 305: mod_base = OTHER; note = thymine
  modified_base 308: mod_base = OTHER; note = thymine
  modified_base 313: mod_base = OTHER; note = thymine
  modified_base 317: mod_base = OTHER; note = thymine
  modified_base 331: mod_base = OTHER; note = thymine
  modified_base 338: mod_base = OTHER; note = thymine
  modified_base 353: mod_base = OTHER; note = thymine
  modified_base 365: mod_base = OTHER; note = thymine
  modified_base 374: mod_base = OTHER; note = thymine
  modified_base 379: mod_base = OTHER; note = thymine
  modified_base 382: mod_base = OTHER; note = thymine
  modified_base 389: mod_base = OTHER; note = thymine
  modified_base 392: mod_base = OTHER; note = thymine
  modified_base 395: mod_base = OTHER; note = thymine
  modified_base 401: mod_base = OTHER; note = thymine
  modified_base 404: mod_base = OTHER; note = thymine
  modified_base 418: mod_base = OTHER; note = thymine
  modified_base 422: mod_base = OTHER; note = thymine
  modified_base 424: mod_base = OTHER; note = thymine
  modified_base 464: mod_base = OTHER; note = thymine
  modified_base 473: mod_base = OTHER; note = thymine
  modified_base 476: mod_base = OTHER; note = thymine
  modified_base 485: mod_base = OTHER; note = thymine
  modified_base 506: mod_base = OTHER; note = thymine
  modified_base 520..521: mod_base = OTHER; note = thymine
  modified_base 539: mod_base = OTHER; note = thymine
  modified_base 545: mod_base = OTHER; note = thymine
  modified_base 553..554: mod_base = OTHER; note = thymine
  modified_base 565: mod_base = OTHER; note = thymine
  modified_base 575: mod_base = OTHER; note = thymine
  modified_base 595: mod_base = OTHER; note = thymine
  modified_base 598: mod_base = OTHER; note = thymine
  modified_base 607..608: mod_base = OTHER; note = thymine
  modified_base 610: mod_base = OTHER; note = thymine
  modified_base 623: mod_base = OTHER; note = thymine
  modified_base 635: mod_base = OTHER; note = thymine
  modified_base 641: mod_base = OTHER; note = thymine
  modified_base 644: mod_base = OTHER; note = thymine
  modified_base 646..647: mod_base = OTHER; note = thymine
  modified_base 664..665: mod_base = OTHER; note = thymine
  modified_base 680: mod_base = OTHER; note = thymine
  modified_base 682: mod_base = OTHER; note = thymine
  modified_base 692: mod_base = OTHER; note = thymine
  modified_base 704: mod_base = OTHER; note = thymine
  modified_base 713: mod_base = OTHER; note = thymine
  modified_base 716: mod_base = OTHER; note = thymine
  modified_base 719: mod_base = OTHER; note = thymine
  modified_base 737: mod_base = OTHER; note = thymine
  modified_base 739: mod_base = OTHER; note = thymine
  modified_base 752: mod_base = OTHER; note = thymine
  modified_base 761: mod_base = OTHER; note = thymine
  modified_base 764: mod_base = OTHER; note = thymine
  modified_base 772: mod_base = OTHER; note = thymine
  modified_base 778..779: mod_base = OTHER; note = thymine
  modified_base 814: mod_base = OTHER; note = thymine
  modified_base 829..830: mod_base = OTHER; note = thymine
  modified_base 833: mod_base = OTHER; note = thymine
  modified_base 835: mod_base = OTHER; note = thymine
  modified_base 839: mod_base = OTHER; note = thymine
  modified_base 848: mod_base = OTHER; note = thymine
  modified_base 857: mod_base = OTHER; note = thymine
  modified_base 863: mod_base = OTHER; note = thymine
  modified_base 866: mod_base = OTHER; note = thymine
  modified_base 877: mod_base = OTHER; note = thymine
  modified_base 890: mod_base = OTHER; note = thymine
  modified_base 914: mod_base = OTHER; note = thymine
  modified_base 917: mod_base = OTHER; note = thymine
  modified_base 928: mod_base = OTHER; note = thymine
  modified_base 937: mod_base = OTHER; note = thymine
  modified_base 944: mod_base = OTHER; note = thymine
  modified_base 949: mod_base = OTHER; note = thymine
  modified_base 968: mod_base = OTHER; note = thymine
  modified_base 971: mod_base = OTHER; note = thymine
  modified_base 973: mod_base = OTHER; note = thymine
  modified_base 977: mod_base = OTHER; note = thymine
  modified_base 991..992: mod_base = OTHER; note = thymine
  modified_base 994..995: mod_base = OTHER; note = thymine
  modified_base 1004: mod_base = OTHER; note = thymine
  modified_base 1009: mod_base = OTHER; note = thymine
  modified_base 1033: mod_base = OTHER; note = thymine
  modified_base 1040: mod_base = OTHER; note = thymine
  modified_base 1043: mod_base = OTHER; note = thymine
  modified_base 1049: mod_base = OTHER; note = thymine
  modified_base 1057: mod_base = OTHER; note = thymine
  modified_base 1067: mod_base = OTHER; note = thymine
  modified_base 1069: mod_base = OTHER; note = thymine
  modified_base 1079: mod_base = OTHER; note = thymine
  modified_base 1094: mod_base = OTHER; note = thymine
  modified_base 1108: mod_base = OTHER; note = thymine
  modified_base 1115: mod_base = OTHER; note = thymine
  modified_base 1121: mod_base = OTHER; note = thymine
  modified_base 1123: mod_base = OTHER; note = thymine
  modified_base 1133: mod_base = OTHER; note = thymine
  modified_base 1145: mod_base = OTHER; note = thymine
  modified_base 1156..1157: mod_base = OTHER; note = thymine
  modified_base 1159: mod_base = OTHER; note = thymine
  modified_base 1163: mod_base = OTHER; note = thymine
  modified_base 1165..1166: mod_base = OTHER; note = thymine
  modified_base 1184: mod_base = OTHER; note = thymine
  modified_base 1196: mod_base = OTHER; note = thymine
  modified_base 1208: mod_base = OTHER; note = thymine
  modified_base 1220: mod_base = OTHER; note = thymine
  modified_base 1223: mod_base = OTHER; note = thymine
  modified_base 1232: mod_base = OTHER; note = thymine
  modified_base 1235: mod_base = OTHER; note = thymine
  modified_base 1244: mod_base = OTHER; note = thymine
  modified_base 1246: mod_base = OTHER; note = thymine
  modified_base 1249..1250: mod_base = OTHER; note = thymine
  modified_base 1258..1259: mod_base = OTHER; note = thymine
  modified_base 1262: mod_base = OTHER; note = thymine
  modified_base 1268: mod_base = OTHER; note = thymine
  modified_base 1270: mod_base = OTHER; note = thymine
  modified_base 1274: mod_base = OTHER; note = thymine
  modified_base 1283: mod_base = OTHER; note = thymine
  modified_base 1292: mod_base = OTHER; note = thymine
  modified_base 1295: mod_base = OTHER; note = thymine
  modified_base 1301: mod_base = OTHER; note = thymine
  modified_base 1304: mod_base = OTHER; note = thymine
  modified_base 1321: mod_base = OTHER; note = thymine
  modified_base 1333: mod_base = OTHER; note = thymine
  modified_base 1343: mod_base = OTHER; note = thymine
  modified_base 1345: mod_base = OTHER; note = thymine
  modified_base 1357: mod_base = OTHER; note = thymine
  modified_base 1385: mod_base = OTHER; note = thymine
  modified_base 1387: mod_base = OTHER; note = thymine
  modified_base 1391: mod_base = OTHER; note = thymine
  modified_base 1400: mod_base = OTHER; note = thymine
  modified_base 1415: mod_base = OTHER; note = thymine
  modified_base 1427: mod_base = OTHER; note = thymine
  modified_base 1430: mod_base = OTHER; note = thymine
  modified_base 1433: mod_base = OTHER; note = thymine
  modified_base 1442: mod_base = OTHER; note = thymine
  modified_base 1444: mod_base = OTHER; note = thymine
  modified_base 1460: mod_base = OTHER; note = thymine
  modified_base 1463: mod_base = OTHER; note = thymine
  modified_base 1472: mod_base = OTHER; note = thymine
  modified_base 1475: mod_base = OTHER; note = thymine
  modified_base 1483: mod_base = OTHER; note = thymine
  modified_base 1489: mod_base = OTHER; note = thymine
  modified_base 1502: mod_base = OTHER; note = thymine
  modified_base 1508: mod_base = OTHER; note = thymine
  modified_base 1526: mod_base = OTHER; note = thymine
  modified_base 1534: mod_base = OTHER; note = thymine
  modified_base 1537..1538: mod_base = OTHER; note = thymine
  modified_base 1556: mod_base = OTHER; note = thymine
  modified_base 1609..1610: mod_base = OTHER; note = thymine
  modified_base 1618: mod_base = OTHER; note = thymine
  modified_base 1621..1622: mod_base = OTHER; note = thymine
  modified_base 1630..1631: mod_base = OTHER; note = thymine
  modified_base 1634: mod_base = OTHER; note = thymine
  modified_base 1648: mod_base = OTHER; note = thymine
  modified_base 1658: mod_base = OTHER; note = thymine
  modified_base 1661: mod_base = OTHER; note = thymine
  modified_base 1667: mod_base = OTHER; note = thymine
  modified_base 1673: mod_base = OTHER; note = thymine
  modified_base 1675: mod_base = OTHER; note = thymine
  modified_base 1696: mod_base = OTHER; note = thymine
  modified_base 1700: mod_base = OTHER; note = thymine
  modified_base 1702: mod_base = OTHER; note = thymine
  modified_base 1705: mod_base = OTHER; note = thymine
  modified_base 1718: mod_base = OTHER; note = thymine
  modified_base 1724: mod_base = OTHER; note = thymine
  modified_base 1733: mod_base = OTHER; note = thymine
  modified_base 1747: mod_base = OTHER; note = thymine
  modified_base 1751: mod_base = OTHER; note = thymine
  modified_base 1757: mod_base = OTHER; note = thymine
  modified_base 1769: mod_base = OTHER; note = thymine
  modified_base 1774..1775: mod_base = OTHER; note = thymine
  modified_base 1777: mod_base = OTHER; note = thymine
  modified_base 1786: mod_base = OTHER; note = thymine
  modified_base 1795: mod_base = OTHER; note = thymine
  modified_base 1798..1799: mod_base = OTHER; note = thymine
  modified_base 1811: mod_base = OTHER; note = thymine
  modified_base 1814: mod_base = OTHER; note = thymine
  modified_base 1817: mod_base = OTHER; note = thymine
  modified_base 1820: mod_base = OTHER; note = thymine
  modified_base 1825: mod_base = OTHER; note = thymine
  modified_base 1858: mod_base = OTHER; note = thymine
  modified_base 1864: mod_base = OTHER; note = thymine
  modified_base 1867..1868: mod_base = OTHER; note = thymine
  modified_base 1885: mod_base = OTHER; note = thymine
  modified_base 1894: mod_base = OTHER; note = thymine
  modified_base 1903..1904: mod_base = OTHER; note = thymine
  modified_base 1916: mod_base = OTHER; note = thymine
  modified_base 1924: mod_base = OTHER; note = thymine
  modified_base 1930..1931: mod_base = OTHER; note = thymine
  modified_base 1939: mod_base = OTHER; note = thymine
  modified_base 1955: mod_base = OTHER; note = thymine
  modified_base 1958: mod_base = OTHER; note = thymine
  modified_base 1961: mod_base = OTHER; note = thymine
  modified_base 1969..1970: mod_base = OTHER; note = thymine
  modified_base 1984..1985: mod_base = OTHER; note = thymine
  modified_base 2000: mod_base = OTHER; note = thymine
  modified_base 2014: mod_base = OTHER; note = thymine
  modified_base 2018: mod_base = OTHER; note = thymine
  modified_base 2026..2027: mod_base = OTHER; note = thymine
  modified_base 2030: mod_base = OTHER; note = thymine
  modified_base 2032: mod_base = OTHER; note = thymine
  modified_base 2038..2039: mod_base = OTHER; note = thymine
  modified_base 2042: mod_base = OTHER; note = thymine
  modified_base 2054: mod_base = OTHER; note = thymine
  modified_base 2060: mod_base = OTHER; note = thymine
  modified_base 2084: mod_base = OTHER; note = thymine
  modified_base 2086..2087: mod_base = OTHER; note = thymine
  modified_base 2092: mod_base = OTHER; note = thymine
  modified_base 2105: mod_base = OTHER; note = thymine
  modified_base 2114: mod_base = OTHER; note = thymine
  modified_base 2117: mod_base = OTHER; note = thymine
  modified_base 2125..2126: mod_base = OTHER; note = thymine
  modified_base 2128: mod_base = OTHER; note = thymine
  modified_base 2135: mod_base = OTHER; note = thymine
  modified_base 2144: mod_base = OTHER; note = thymine
  modified_base 2174: mod_base = OTHER; note = thymine
  modified_base 2183: mod_base = OTHER; note = thymine
  modified_base 2186: mod_base = OTHER; note = thymine
  modified_base 2189: mod_base = OTHER; note = thymine
  modified_base 2194: mod_base = OTHER; note = thymine
  modified_base 2197: mod_base = OTHER; note = thymine
  modified_base 2204: mod_base = OTHER; note = thymine
  modified_base 2210: mod_base = OTHER; note = thymine
  modified_base 2222: mod_base = OTHER; note = thymine
  modified_base 2230..2231: mod_base = OTHER; note = thymine
  modified_base 2234: mod_base = OTHER; note = thymine
  modified_base 2239: mod_base = OTHER; note = thymine
  modified_base 2249: mod_base = OTHER; note = thymine
  modified_base 2257..2258: mod_base = OTHER; note = thymine
  modified_base 2273: mod_base = OTHER; note = thymine
  modified_base 2294: mod_base = OTHER; note = thymine
  modified_base 2297: mod_base = OTHER; note = thymine
  modified_base 2314..2315: mod_base = OTHER; note = thymine
  modified_base 2326: mod_base = OTHER; note = thymine
  modified_base 2332..2333: mod_base = OTHER; note = thymine
  modified_base 2335..2336: mod_base = OTHER; note = thymine
  modified_base 2348: mod_base = OTHER; note = thymine
  modified_base 2351: mod_base = OTHER; note = thymine
  modified_base 2354: mod_base = OTHER; note = thymine
  modified_base 2360: mod_base = OTHER; note = thymine
  modified_base 2362..2363: mod_base = OTHER; note = thymine
  modified_base 2389..2390: mod_base = OTHER; note = thymine
  modified_base 2417: mod_base = OTHER; note = thymine
  modified_base 2426: mod_base = OTHER; note = thymine
  modified_base 2429: mod_base = OTHER; note = thymine
  modified_base 2441: mod_base = OTHER; note = thymine
  modified_base 2443: mod_base = OTHER; note = thymine
  modified_base 2446: mod_base = OTHER; note = thymine
  modified_base 2462: mod_base = OTHER; note = thymine
  modified_base 2470: mod_base = OTHER; note = thymine
  modified_base 2474: mod_base = OTHER; note = thymine
  modified_base 2483: mod_base = OTHER; note = thymine
  modified_base 2485..2486: mod_base = OTHER; note = thymine
  modified_base 2489: mod_base = OTHER; note = thymine
  modified_base 2491: mod_base = OTHER; note = thymine
  modified_base 2513: mod_base = OTHER; note = thymine
  modified_base 2515: mod_base = OTHER; note = thymine
  modified_base 2531: mod_base = OTHER; note = thymine
  modified_base 2540: mod_base = OTHER; note = thymine
  modified_base 2545: mod_base = OTHER; note = thymine
  modified_base 2558: mod_base = OTHER; note = thymine
  modified_base 2570: mod_base = OTHER; note = thymine
  modified_base 2572: mod_base = OTHER; note = thymine
  modified_base 2576: mod_base = OTHER; note = thymine
  modified_base 2579: mod_base = OTHER; note = thymine
  modified_base 2585: mod_base = OTHER; note = thymine
  modified_base 2591: mod_base = OTHER; note = thymine
  modified_base 2600: mod_base = OTHER; note = thymine
  modified_base 2606: mod_base = OTHER; note = thymine
  modified_base 2615: mod_base = OTHER; note = thymine
  modified_base 2624: mod_base = OTHER; note = thymine
  modified_base 2627: mod_base = OTHER; note = thymine
  modified_base 2651: mod_base = OTHER; note = thymine
  modified_base 2653: mod_base = OTHER; note = thymine
  modified_base 2663: mod_base = OTHER; note = thymine
  modified_base 2675: mod_base = OTHER; note = thymine
  modified_base 2707..2708: mod_base = OTHER; note = thymine
  modified_base 2719..2720: mod_base = OTHER; note = thymine
  modified_base 2722: mod_base = OTHER; note = thymine
  modified_base 2728: mod_base = OTHER; note = thymine
  modified_base 2759: mod_base = OTHER; note = thymine
  modified_base 2768: mod_base = OTHER; note = thymine
  modified_base 2774: mod_base = OTHER; note = thymine
  modified_base 2783: mod_base = OTHER; note = thymine
  modified_base 2798: mod_base = OTHER; note = thymine
  modified_base 2800: mod_base = OTHER; note = thymine
  modified_base 2804: mod_base = OTHER; note = thymine
  modified_base 2822: mod_base = OTHER; note = thymine
  modified_base 2840: mod_base = OTHER; note = thymine
  modified_base 2843: mod_base = OTHER; note = thymine
  modified_base 2849: mod_base = OTHER; note = thymine
  modified_base 2855: mod_base = OTHER; note = thymine
  modified_base 2857..2858: mod_base = OTHER; note = thymine
  modified_base 2875: mod_base = OTHER; note = thymine
  modified_base 2878: mod_base = OTHER; note = thymine
  modified_base 2882: mod_base = OTHER; note = thymine
  modified_base 2885: mod_base = OTHER; note = thymine
  modified_base 2891: mod_base = OTHER; note = thymine
  modified_base 2893: mod_base = OTHER; note = thymine
  modified_base 2896: mod_base = OTHER; note = thymine
  modified_base 2899: mod_base = OTHER; note = thymine
  modified_base 2906: mod_base = OTHER; note = thymine
  modified_base 2918: mod_base = OTHER; note = thymine
  modified_base 2921: mod_base = OTHER; note = thymine
  modified_base 2936: mod_base = OTHER; note = thymine
  modified_base 2939: mod_base = OTHER; note = thymine
  modified_base 2944: mod_base = OTHER; note = thymine
  modified_base 2962: mod_base = OTHER; note = thymine
  modified_base 2969: mod_base = OTHER; note = thymine
  modified_base 2972: mod_base = OTHER; note = thymine
  modified_base 2980: mod_base = OTHER; note = thymine
  modified_base 2983..2984: mod_base = OTHER; note = thymine
  modified_base 2989..2990: mod_base = OTHER; note = thymine
  modified_base 2995..2996: mod_base = OTHER; note = thymine
  modified_base 2999: mod_base = OTHER; note = thymine
  modified_base 3002: mod_base = OTHER; note = thymine
  modified_base 3004: mod_base = OTHER; note = thymine
  modified_base 3007: mod_base = OTHER; note = thymine
  modified_base 3017: mod_base = OTHER; note = thymine
  modified_base 3020: mod_base = OTHER; note = thymine
  modified_base 3026: mod_base = OTHER; note = thymine
  modified_base 3032: mod_base = OTHER; note = thymine
  modified_base 3043: mod_base = OTHER; note = thymine
  modified_base 3046..3047: mod_base = OTHER; note = thymine
  modified_base 3050: mod_base = OTHER; note = thymine
  modified_base 3055: mod_base = OTHER; note = thymine
  modified_base 3058..3059: mod_base = OTHER; note = thymine
  modified_base 3061: mod_base = OTHER; note = thymine
  modified_base 3068: mod_base = OTHER; note = thymine
  modified_base 3089: mod_base = OTHER; note = thymine
  modified_base 3091: mod_base = OTHER; note = thymine
  modified_base 3095: mod_base = OTHER; note = thymine
  modified_base 3110: mod_base = OTHER; note = thymine
  modified_base 3118: mod_base = OTHER; note = thymine
  modified_base 3137: mod_base = OTHER; note = thymine
  modified_base 3146: mod_base = OTHER; note = thymine
  modified_base 3152: mod_base = OTHER; note = thymine
  modified_base 3164: mod_base = OTHER; note = thymine
  modified_base 3166: mod_base = OTHER; note = thymine
  modified_base 3169..3170: mod_base = OTHER; note = thymine
  modified_base 3178: mod_base = OTHER; note = thymine
  modified_base 3185: mod_base = OTHER; note = thymine
  modified_base 3194: mod_base = OTHER; note = thymine
  modified_base 3206: mod_base = OTHER; note = thymine
  modified_base 3214: mod_base = OTHER; note = thymine
  modified_base 3221: mod_base = OTHER; note = thymine
  modified_base 3239: mod_base = OTHER; note = thymine
  misc_feature 1..3246: note = Synthetic
  source 1..3246: mol_type = other RNA
atggcagcattcaaaccaaacccaatcaactacatcctaggactagcaatcggaatcgcatcagtaggatgagcaatggtagaaatcgacgaagaagaaaacccaatccgactaatcgacctaggagtacgagtattcgaacgagcagaagtaccaaaaacaggagactcactagcaatggcacgacgactagcacgatcagtacgacgactaacacgacgacgagcacaccgactactacgagcacgacgactactaaaacgagaaggagtactacaagcagcagacttcgacgaaaacggactaatcaaatcactaccaaacacaccatgacaactacgagcagcagcactagaccgaaaactaacaccactagaatgatcagcagtactactacacctaatcaaacaccgaggatacctatcacaacgaaaaaacgaaggagaaacagcagacaaagaactaggagcactactaaaaggagtagcagacaacgcacacgcactacaaacaggagacttccgaacaccagcagaactagcactaaacaaattcgaaaaagaatgcggacacatccgaaaccaacgaggagactactcacacacattctcacgaaaagacctacaagcagaactaaacctactattcgaaaaacaaaaagaattcggaaacccacacgtatcaggaggactaaaagaaggaatcgaaacactactaatgacacaacgaccagcactatcaggagacgcagtacaaaaaatgctaggacactgcacattcgaaccagcagaaccaaaagcagcaaaaaacacatacacagcagaacgattcatctgactaacaaaactaaacaacctacgaatcctagaacaaggatcagaacgaccactaacagacacagaacgagcaacactaatggacgaaccataccgaaaatcaaaactaacatacgcacaagcacgaaaactactatcactagaagacacagcattcttcaaaggactacgatacggaaaagacaacgcagaagcatcaacactaatggaaatgaaagcataccacacaatctcacgagcactagaaaaagaaggactaaaagacaaaaaatcaccactaaacctatcaccagaactacaagacgaaatcggaacagcattctcactattcaaaacagacgaagacatcacaggacgactaaaagaccgaatccaaccagaaatcctagaagcactactaaaacacatctcattcgacaaattcgtacaaatctcactaaaagcactacgacgaatcgtaccactaatggaacaaggaaaacgatacgacgaagcatgcgcagaaatctacggagaccactacggaaaaaaaaacacagaagaaaaaatctacctaccaccaatcccagcagacgaaatccgaaacccagtagtactacgagcactatcacaagcacgaaaagtaatcaacggagtagtacgacgatacggatcaccagcacgaatccacatcgaaacagcacgagaagtaggaaaatcattcaaagaccgaaaagaaatcgaaaaacgacaagaagaaaaccgaaaagaccgagaaaaagcagcagcaaaattccgagaatacttcccaaacttcgtaggagaaccaaaatcaaaagacatcctaaaactacgactatacgaacaacaacacggaaaatgcctatactcaggaaaagaaatcaacctaggacgactaaacgaaaaaggatacgtagaaatcgaccacgcactaccattctcacgaacatgagacgactcattcaacaacaaagtactagtactaggatcagaaaaccaaaacaaaggaaaccaaacaccatacgaatacttcaacggaaaagacaactcacgagaatgacaagaattcaaagcacgagtagaaacatcacgattcccacgatcaaaaaaacaacgaatcctactacaaaaattcgacgaagacggattcaaagaacgaaacctaaacgacacacgatacgtaaaccgattcctatgccaattcgtagcagaccgaatgcgactaacaggaaaaggaaaaaaacgagtattcgcatcaaacggacaaatcacaaacctactacgaggattctgaggactacgaaaagtacgagcagaaaacgaccgacaccacgcactagacgcagtagtagtagcatgctcaacagtagcaatgcaacaaaaaatcacacgattcgtacgatacaaagaaatgaacgcattcgacggaaaaacaatcgacaaagaaacaggagaagtactacaccaaaaaacacacttcccacaaccatgagaattcttcgcacaagaagtaatgatccgagtattcggaaaaccagacggaaaaccagaattcgaagaagcagacacaccagaaaaactacgaacactactagcagaaaaactatcatcacgaccagaagcagtacacgaatacgtaacaccactattcgtatcacgagcaccaaaccgaaaaatgtcaggacaaggacacatggaaacagtaaaatcagcaaaacgactagacgaaggagtatcagtactacgagtaccactaacacaactaaaactaaaagacctagaaaaaatggtaaaccgagaacgagaaccaaaactatacgaagcactaaaagcacgactagaagcacacaaagacgacccagcaaaagcattcgcagaaccattctacaaatacgacaaagcaggaaaccgaacacaacaagtaaaagcagtacgagtagaacaagtacaaaaaacaggagtatgagtacgaaaccacaacggaatcgcagacaacgcaacaatggtacgagtagacgtattcgaaaaaggagacaaatactacctagtaccaatctactcatgacaagtagcaaaaggaatcctaccagaccgagcagtagtagcatacgcagacgaagaagactgaacagtaatcgacgaatcattccgattcaaattcgtactatactcaaacgacctaatcaaagtacaactaaaaaaagactcattcctaggatacttctcaggactagaccgagcaacaggagcaatctcactacgagaacacgacctagaaaaatcaaaaggaaaagacggaatgcaccgaatcggagtaaaaacagcactatcattccaaaaataccaaatcgacgaaatgggaaaagaaatccgaccatgccgactaaaaaaacgaccaccagtacgataa

SEQ ID NO: 297 - protein, 1081 aa, synthetic construct
  REGION 1..1081: note = Synthetic
MAAFKPNPINYILGLDIGIASVGWAMVEIDEEENPIRLIDLGVRVFERAEVPKTGDSLAMARRLARSVRRLTRRRAHRLLRARRLLKREGVLQAADFDENGLIKSLPNTPWQLRAAALDRKLTPLEWSAVLLHLIKHRGYLSQRKNEGETADKELGALLKGVADNAHALQTGDFRTPAELALNKFEKECGHIRNQRGDYSHTFSRKDLQAELNLLFEKQKEFGNPHVSGGLKEGIETLLMTQRPALSGDAVQKMLGHCTFEPAEPKAAKNTYTAERFIWLTKLNNLRILEQGSERPLTDTERATLMDEPYRKSKLTYAQARKLLSLEDTAFFKGLRYGKDNAEASTLMEMKAYHTISRALEKEGLKDKKSPLNLSPELQDEIGTAFSLFKTDEDITGRLKDRIQPEILEALLKHISFDKFVQISLKALRRIVPLMEQGKRYDEACAEIYGDHYGKKNTEEKIYLPPIPADEIRNPVVLRALSQARKVINGVVRRYGSPARIHIETAREVGKSFKDRKEIEKRQEENRKDREKAAAKFREYFPNFVGEPKSKDILKLRLYEQQHGKCLYSGKEINLGRLNEKGYVEIDAALPFSRTWDDSFNNKVLVLGSENQNKGNQTPYEYFNGKDNSREWQEFKARVETSRFPRSKKQRILLQKFDEDGFKERNLNDTRYVNRFLCQFVADRMRLTGKGKKRVFASNGQITNLLRGFWGLRKVRAENDRHHALDAVVVACSTVAMQQKITRFVRYKEMNAFDGKTIDKETGEVLHQKTHFPQPWEFFAQEVMIRVFGKPDGKPEFEEADTPEKLRTLLAEKLSSRPEAVHEYVTPLFVSRAPNRKMSGQGHMETVKSAKRLDEGVSVLRVPLTQLKLKDLEKMVNREREPKLYEALKARLEAHKDDPAKAFAEPFYKYDKAGNRTQQVKAVRVEQVQKTGVWVRNHNGIADNATMVRVDVFEKGDKYYLVPIYSWQVAKGILPDRAVVAYADEEDWTVIDESFRFKFVLYSNDLIKVQLKKDSFLGYFSGLDRATGAISLREHDLEKSKGKDGMHRIGVKTALSFQKYQIDEMGKEIRPCRLKKRPPVR

SEQ ID NO: 298 - DNA, 3240 bp, synthetic construct
  misc_feature 1..3240: note = Synthetic
  source 1..3240: mol_type = other DNA
gctgcttttaagcctaatcctattaattatattcttggtcttgatattggtattgcttctgttggttgggctatggttgagattgatgaggaggagaatcctattcgtcttattgatcttggtgttcgtgtttttgagcgtgctgaggttcctaagactggtgattctcttgctatggctcgtcgtcttgctcgttctgttcgtcgtcttactcgtcgtcgtgctcatcgtcttcttcgtgctcgtcgtcttcttaagcgtgagggtgttcttcaggctgctgattttgatgagaatggtcttattaagtctcttcctaatactccttggcagcttcgtgctgctgctcttgatcgtaagcttactcctcttgagtggtctgctgttcttcttcatcttattaagcatcgtggttatctttctcagcgtaagaatgagggtgagactgctgataaggagcttggtgctcttcttaagggtgttgctgataatgctcatgctcttcagactggtgattttcgtactcctgctgagcttgctcttaataagtttgagaaggagtgtggtcatattcgtaatcagcgtggtgattattctcatactttttctcgtaaggatcttcaggctgagcttaatcttctttttgagaagcagaaggagtttggtaatcctcatgtttctggtggtcttaaggagggtattgagactcttcttatgactcagcgtcctgctctttctggtgatgctgttcagaagatgcttggtcattgtacttttgagcctgctgagcctaaggctgctaagaatacttatactgctgagcgttttatttggcttactaagcttaataatcttcgtattcttgagcagggttctgagcgtcctcttactgatactgagcgtgctactcttatggatgagccttatcgtaagtctaagcttacttatgctcaggctcgtaagcttctttctcttgaggatactgctttttttaagggtcttcgttatggtaaggataatgctgaggcttctactcttatggagatgaaggcttatcatactatttctcgtgctcttgagaaggagggtcttaaggataagaagtctcctcttaatctttctcctgagcttcaggatgagattggtactgctttttctctttttaagactgatgaggatattactggtcgtcttaaggatcgtattcagcctgagattcttgaggctcttcttaagcatatttcttttgataagtttgttcagatttctcttaaggctcttcgtcgtattgttcctcttatggagcagggtaagcgttatgatgaggcttgtgctgagatttatggtgatcattatggtaagaagaatactgaggagaagatttatcttcctcctattcctgctgatgagattcgtaatcctgttgttcttcgtgctctttctcaggctcgtaaggttattaatggtgttgttcgtcgttatggttctcctgctcgtattcatattgagactgctcgtgaggttggtaagtcttttaaggatcgtaaggagattgagaagcgtcaggaggagaatcgtaaggatcgtgagaaggctgctgctaagtttcgtgagtattttcctaattttgttggtgagcctaagtctaaggatattcttaagcttcgtctttatgagcagcagcatggtaagtgtctttattctggtaaggagattaatcttggtcgtcttaatgagaagggttatgttgagattgatgctgctcttcctttttctcgtacttgggatgattcttttaataataaggttcttgttcttggttctgagaatcagaataagggtaatcagactccttatgagtattttaatggtaaggataattctcgtgagtggcaggagtttaaggctcgtgttgagacttctcgttttcctcgttctaagaagcagcgtattcttcttcagaagtttgatgaggatggttttaaggagcgtaatcttaatgatactcgttatgttaatcgttttctttgtcagtttgttgctgatcgtatgcgtcttactggtaagggtaagaagcgtgtttttgcttctaatggtcagattactaatcttcttcgtggtttttggggtcttcgtaaggttcgtgctgagaatgatcgtcatcatgctcttgatgctgttgttgttgcttgttctactgttgctatgcagcagaagattactcgttttgttcgttataaggagatgaatgcttttgatggtaagactattgataaggagactggtgaggttcttcatcagaagactcattttcctcagccttgggagttttttgctcaggaggttatgattcgtgtttttggtaagcctgatggtaagcctgagtttgaggaggctgatactcctgagaagcttcgtactcttcttgctgagaagctttcttctcgtcctgaggctgttcatgagtatgttactcctctttttgtttctcgtgctcctaatcgtaagatgtctggtcagggtcatatggagactgttaagtctgctaagcgtcttgatgagggtgtttctgttcttcgtgttcctcttactcagcttaagcttaaggatcttgagaagatggttaatcgtgagcgtgagcctaagctttatgaggctcttaaggctcgtcttgaggctcataaggatgatcctgctaaggcttttgctgagcctttttataagtatgataaggctggtaatcgtactcagcaggttaaggctgttcgtgttgagcaggttcagaagactggtgtttgggttcgtaatcataatggtattgctgataatgctactatggttcgtgttgatgtttttgagaagggtgataagtattatcttgttcctatttattcttggcaggttgctaagggtattcttcctgatcgtgctgttgttgcttatgctgatgaggaggattggactgttattgatgagtcttttcgttttaagtttgttctttattctaatgatcttattaaggttcagcttaagaaggattcttttcttggttatttttctggtcttgatcgtgctactggtgctatttctcttcgtgagcatgatcttgagaagtctaagggtaaggatggtatgcatcgtattggtgttaagactgctctttcttttcagaagtatcagattgatgagatgggtaaggagattcgtccttgtcgtcttaagaagcgtcctcctgttcgt

SEQ ID NO: 299 - DNA, 3240 bp, synthetic construct
  misc_feature 1..3240: note = Synthetic
  source 1..3240: mol_type = other DNA
gccgccttcaagcccaaccccatcaactacatcctgggcctggacatcggcatcgcctccgtgggctgggccatggtggagatcgacgaggaggagaaccccatccggctgatcgacctgggcgtgcgggtgttcgagcgggccgaggtgcccaagaccggcgactccctggccatggcccggcggctggcccggtccgtgcggcggctgacccggcggcgggcccaccggctgctgcgggcccggcggctgctgaagcgggagggcgtgctgcaggccgccgacttcgacgagaacggcctgatcaagtccctgcccaacaccccctggcagctgcgggccgccgccctggaccggaagctgacccccctggagtggtccgccgtgctgctgcacctgatcaagcaccggggctacctgtcccagcggaagaacgagggcgagaccgccgacaaggagctgggcgccctgctgaagggcgtggccgacaacgcccacgccctgcagaccggcgacttccggacccccgccgagctggccctgaacaagttcgagaaggagtgcggccacatccggaaccagcggggcgactactcccacaccttctcccggaaggacctgcaggccgagctgaacctgctgttcgagaagcagaaggagttcggcaacccccacgtgtccggcggcctgaaggagggcatcgagaccctgctgatgacccagcggcccgccctgtccggcgacgccgtgcagaagatgctgggccactgcaccttcgagcccgccgagcccaaggccgccaagaacacctacaccgccgagcggttcatctggctgaccaagctgaacaacctgcggatcctggagcagggctccgagcggcccctgaccgacaccgagcgggccaccctgatggacgagccctaccggaagtccaagctgacctacgcccaggcccggaagctgctgtccctggaggacaccgccttcttcaagggcctgcggtacggcaaggacaacgccgaggcctccaccctgatggagatgaaggcctaccacaccatctcccgggccctggagaaggagggcctgaaggacaagaagtcccccctgaacctgtcccccgagctgcaggacgagatcggcaccgccttctccctgttcaagaccgacgaggacatcaccggccggctgaaggaccggatccagcccgagatcctggaggccctgctgaagcacatctccttcgacaagttcgtgcagatctccctgaaggccctgcggcggatcgtgcccctgatggagcagggcaagcggtacgacgaggcctgcgccgagatctacggcgaccactacggcaagaagaacaccgaggagaagatctacctgccccccatccccgccgacgagatccggaaccccgtggtgctgcgggccctgtcccaggcccggaaggtgatcaacggcgtggtgcggcggtacggctcccccgcccggatccacatcgagaccgcccgggaggtgggcaagtccttcaaggaccggaaggagatcgagaagcggcaggaggagaaccggaaggaccgggagaaggccgccgccaagttccgggagtacttccccaacttcgtgggcgagcccaagtccaaggacatcctgaagctgcggctgtacgagcagcagcacggcaagtgcctgtactccggcaaggagatcaacctgggccggctgaacgagaagggctacgtggagatcgacgccgccctgcccttctcccggacctgggacgactccttcaacaacaaggtgctggtgctgggctccgagaaccagaacaagggcaaccagaccccctacgagtacttcaacggcaaggacaactcccgggagtggcaggagttcaaggcccgggtggagacctcccggttcccccggtccaagaagcagcggatcctgctgcagaagttcgacgaggacggcttcaaggagcggaacctgaacgacacccggtacgtgaaccggttcctgtgccagttcgtggccgaccggatgcggctgaccggcaagggcaagaagcgggtgttcgcctccaacggccagatcaccaacctgctgcggggcttctggggcctgcggaaggtgcgggccgagaacgaccggcaccacgccctggacgccgtggtggtggcctgctccaccgtggccatgcagcagaagatcacccggttcgtgcggtacaaggagatgaacgccttcgacggcaagaccatcgacaaggagaccggcgaggtgctgcaccagaagacccacttcccccagccctgggagttcttcgcccaggaggtgatgatccgggtgttcggcaagcccgacggcaagcccgagttcgaggaggccgacacccccgagaagctgcggaccctgctggccgagaagctgtcctcccggcccgaggccgtgcacgagtacgtgacccccctgttcgtgtcccgggcccccaaccggaagatgtccggccagggccacatggagaccgtgaagtccgccaagcggctggacgagggcgtgtccgtgctgcgggtgcccctgacccagctgaagctgaaggacctggagaagatggtgaaccgggagcgggagcccaagctgtacgaggccctgaaggcccggctggaggcccacaaggacgaccccgccaaggccttcgccgagcccttctacaagtacgacaaggccggcaaccggacccagcaggtgaaggccgtgcgggtggagcaggtgcagaagaccggcgtgtgggtgcggaaccacaacggcatcgccgacaacgccaccatggtgcgggtggacgtgttcgagaagggcgacaagtactacctggtgcccatctactcctggcaggtggccaagggcatcctgcccgaccgggccgtggtggcctacgccgacgaggaggactggaccgtgatcgacgagtccttccggttcaagttcgtgctgtactccaacgacctgatcaaggtgcagctgaagaaggactccttcctgggctacttctccggcctggaccgggccaccggcgccatctccctgcgggagcacgacctggagaagtccaagggcaaggacggcatgcaccggatcggcgtgaagaccgccctgtccttccagaagtaccagatcgacgagatgggcaaggagatccggccctgccggctgaagaagcggccccccgtgcgg

SEQ ID NO: 300 - DNA, 3240 bp, synthetic construct
  misc_feature 1..3240: note = Synthetic
  source 1..3240: mol_type = other DNA
gcagcattcaaaccaaacccaatcaactacatcctaggactagacatcggaatcgcatcagtaggatgagcaatggtagaaatcgacgaagaagaaaacccaatccgactaatcgacctaggagtacgagtattcgaacgagcagaagtaccaaaaacaggagactcactagcaatggcacgacgactagcacgatcagtacgacgactaacacgacgacgagcacaccgactactacgagcacgacgactactaaaacgagaaggagtactacaagcagcagacttcgacgaaaacggactaatcaaatcactaccaaacacaccatgacaactacgagcagcagcactagaccgaaaactaacaccactagaatgatcagcagtactactacacctaatcaaacaccgaggatacctatcacaacgaaaaaacgaaggagaaacagcagacaaagaactaggagcactactaaaaggagtagcagacaacgcacacgcactacaaacaggagacttccgaacaccagcagaactagcactaaacaaattcgaaaaagaatgcggacacatccgaaaccaacgaggagactactcacacacattctcacgaaaagacctacaagcagaactaaacctactattcgaaaaacaaaaagaattcggaaacccacacgtatcaggaggactaaaagaaggaatcgaaacactactaatgacacaacgaccagcactatcaggagacgcagtacaaaaaatgctaggacactgcacattcgaaccagcagaaccaaaagcagcaaaaaacacatacacagcagaacgattcatctgactaacaaaactaaacaacctacgaatcctagaacaaggatcagaacgaccactaacagacacagaacgagcaacactaatggacgaaccataccgaaaatcaaaactaacatacgcacaagcacgaaaactactatcactagaagacacagcattcttcaaaggactacgatacggaaaagacaacgcagaagcatcaacactaatggaaatgaaagcataccacacaatctcacgagcactagaaaaagaaggactaaaagacaaaaaatcaccactaaacctatcaccagaactacaagacgaaatcggaacagcattctcactattcaaaacagacgaagacatcacaggacgactaaaagaccgaatccaaccagaaatcctagaagcactactaaaacacatctcattcgacaaattcgtacaaatctcactaaaagcactacgacgaatcgtaccactaatggaacaaggaaaacgatacgacgaagcatgcgcagaaatctacggagaccactacggaaaaaaaaacacagaagaaaaaatctacctaccaccaatcccagcagacgaaatccgaaacccagtagtactacgagcactatcacaagcacgaaaagtaatcaacggagtagtacgacgatacggatcaccagcacgaatccacatcgaaacagcacgagaagtaggaaaatcattcaaagaccgaaaagaaatcgaaaaacgacaagaagaaaaccgaaaagaccgagaaaaagcagcagcaaaattccgagaatacttcccaaacttcgtaggagaaccaaaatcaaaagacatcctaaaactacgactatacgaacaacaacacggaaaatgcctatactcaggaaaagaaatcaacctaggacgactaaacgaaaaaggatacgtagaaatcgacgcagcactaccattctcacgaacatgagacgactcattcaacaacaaagtactagtactaggatcagaaaaccaaaacaaaggaaaccaaacaccatacgaatacttcaacggaaaagacaactcacgagaatgacaagaattcaaagcacgagtagaaacatcacgattcccacgatcaaaaaaacaacgaatcctactacaaaaattcgacgaagacggattcaaagaacgaaacctaaacgacacacgatacgtaaaccgattcctatgccaattcgtagcagaccgaatgcgactaacaggaaaaggaaaaaaacgagtattcgcatcaaacggacaaatcacaaacctactacgaggattctgaggactacgaaaagtacgagcagaaaacgaccgacaccacgcactagacgcagtagtagtagcatgctcaacagtagcaatgcaacaaaaaatcacacgattcgtacgatacaaagaaatgaacgcattcgacggaaaaacaatcgacaaagaaacaggagaagtactacaccaaaaaacacacttcccacaaccatgagaattcttcgcacaagaagtaatgatccgagtattcggaaaaccagacggaaaaccagaattcgaagaagcagacacaccagaaaaactacgaacactactagcagaaaaactatcatcacgaccagaagcagtacacgaatacgtaacaccactattcgtatcacgagcaccaaaccgaaaaatgtcaggacaaggacacatggaaacagtaaaatcagcaaaacgactagacgaaggagtatcagtactacgagtaccactaacacaactaaaactaaaagacctagaaaaaatggtaaaccgagaacgagaaccaaaactatacgaagcactaaaagcacgactagaagcacacaaagacgacccagcaaaagcattcgcagaaccattctacaaatacgacaaagcaggaaaccgaacacaacaagtaaaagcagtacgagtagaacaagtacaaaaaacaggagtatgagtacgaaaccacaacggaatcgcagacaacgcaacaatggtacgagtagacgtattcgaaaaaggagacaaatactacctagtaccaatctactcatgacaagtagcaaaaggaatcctaccagaccgagcagtagtagcatacgcagacgaagaagactgaacagtaatcgacgaatcattccgattcaaattcgtactatactcaaacgacctaatcaaagtacaactaaaaaaagactcattcctaggatacttctcaggactagaccgagcaacaggagcaatctcactacgagaacacgacctagaaaaatcaaaaggaaaagacggaatgcaccgaatcggagtaaaaacagcactatcattccaaaaataccaaatcgacgaaatgggaaaagaaatccgaccatgccgactaaaaaaacgaccaccagtacga

SEQ ID NO: 301 - RNA, 3246 nt, synthetic construct
  modified_base 2: mod_base = OTHER; note = thymine
  modified_base 6: mod_base = OTHER; note = thymine
  modified_base 9..12: mod_base = OTHER; note = thymine
  modified_base 18: mod_base = OTHER; note = thymine
  modified_base 21: mod_base = OTHER; note = thymine
  modified_base 24: mod_base = OTHER; note = thymine
  modified_base 26..27: mod_base = OTHER; note = thymine
  modified_base 30..31: mod_base = OTHER; note = thymine
  modified_base 33: mod_base = OTHER; note = thymine
  modified_base 35..36: mod_base = OTHER; note = thymine
  modified_base 38..39: mod_base = OTHER; note = thymine
  modified_base 42: mod_base = OTHER; note = thymine
  modified_base 44..45: mod_base = OTHER; note = thymine
  modified_base 48: mod_base = OTHER; note = thymine
  modified_base 50..51: mod_base = OTHER; note = thymine
  modified_base 54: mod_base = OTHER; note = thymine
  modified_base 56..57: mod_base = OTHER; note = thymine
  modified_base 60..61: mod_base = OTHER; note = thymine
  modified_base 63: mod_base = OTHER; note = thymine
  modified_base 65..66: mod_base = OTHER; note = thymine
  modified_base 69..70: mod_base = OTHER; note = thymine
  modified_base 75: mod_base = OTHER; note = thymine
  modified_base 77: mod_base = OTHER; note = thymine
  modified_base 80..81: mod_base = OTHER; note = thymine
  modified_base 86..87: mod_base = OTHER; note = thymine
  modified_base 90: mod_base = OTHER; note = thymine
  modified_base 102: mod_base = OTHER; note = thymine
  modified_base 105: mod_base = OTHER; note = thymine
  modified_base 107..108: mod_base = OTHER; note = thymine
  modified_base 111: mod_base = OTHER; note = thymine
  modified_base 113..114: mod_base = OTHER; note = thymine
  modified_base 116..117: mod_base = OTHER; note = thymine
  modified_base 120: mod_base = OTHER; note = thymine
  modified_base 122..123: mod_base = OTHER; note = thymine
  modified_base 126: mod_base = OTHER; note = thymine
  modified_base 128..129: mod_base = OTHER; note = thymine
  modified_base 132: mod_base = OTHER; note = thymine
  modified_base 134..138: mod_base = OTHER; note = thymine
  modified_base 144: mod_base = OTHER; note = thymine
  modified_base 147: mod_base = OTHER; note = thymine
  modified_base 152..153: mod_base = OTHER; note = thymine
  modified_base 156: mod_base = OTHER; note = thymine
  modified_base 162: mod_base = OTHER; note = thymine
  modified_base 165: mod_base = OTHER; note = thymine
  modified_base 168..169: mod_base = OTHER; note = thymine
  modified_base 171: mod_base = OTHER; note = thymine
  modified_base 173..174: mod_base = OTHER; note = thymine
  modified_base 177: mod_base = OTHER; note = thymine
  modified_base 179: mod_base = OTHER; note = thymine
  modified_base 183: mod_base = OTHER; note = thymine
  modified_base 186: mod_base = OTHER; note = thymine
  modified_base 189: mod_base = OTHER; note = thymine
  modified_base 191..192: mod_base = OTHER; note = thymine
  modified_base 195: mod_base = OTHER; note = thymine
  modified_base 198..199: mod_base = OTHER; note = thymine
  modified_base 201: mod_base = OTHER; note = thymine
  modified_base 203..204: mod_base = OTHER; note = thymine
  modified_base 207: mod_base = OTHER; note = thymine
  modified_base 210: mod_base = OTHER; note = thymine
  modified_base 212..213: mod_base = OTHER; note = thymine
  modified_base 216: mod_base = OTHER; note = thymine
  modified_base 219: mod_base = OTHER; note = thymine
  modified_base 222: mod_base = OTHER; note = thymine
  modified_base 225: mod_base = OTHER; note = thymine
  modified_base 228: mod_base = OTHER; note = thymine
  modified_base 231: mod_base = OTHER; note = thymine
  modified_base 234: mod_base = OTHER; note = thymine
  modified_base 236..237: mod_base = OTHER; note = thymine
  modified_base 239..240: mod_base = OTHER; note = thymine
  modified_base 243: mod_base = OTHER; note = thymine
  modified_base 246: mod_base = OTHER; note = thymine
  modified_base 249: mod_base = OTHER; note = thymine
  modified_base 252: mod_base = OTHER; note = thymine
  modified_base 254..255: mod_base = OTHER; note = thymine
  modified_base 257..258: mod_base = OTHER; note = thymine
  modified_base 264: mod_base = OTHER; note = thymine
  modified_base 270: mod_base = OTHER; note = thymine
  modified_base 272..273: mod_base = OTHER; note = thymine
  modified_base 275..276: mod_base = OTHER; note = thymine
  modified_base 282: mod_base = OTHER; note = thymine
  modified_base 285: mod_base = OTHER; note = thymine
  modified_base 288..291: mod_base = OTHER; note = thymine
  modified_base 294: mod_base = OTHER; note = thymine
  modified_base 300: mod_base = OTHER; note = thymine
  modified_base 303: mod_base = OTHER; note = thymine
  modified_base 305..306: mod_base = OTHER; note = thymine
  modified_base 308..309: mod_base = OTHER; note = thymine
  modified_base 313: mod_base = OTHER; note = thymine
  modified_base 315: mod_base = OTHER; note = thymine
  modified_base 317..318: mod_base = OTHER; note = thymine
  modified_base 321: mod_base = OTHER; note = thymine
  modified_base 324: mod_base = OTHER; note = thymine
  modified_base 327: mod_base = OTHER; note = thymine
  modified_base 330..331: mod_base = OTHER; note = thymine
  modified_base 338..339: mod_base = OTHER; note = thymine
  modified_base 342: mod_base = OTHER; note = thymine
  modified_base 345: mod_base = OTHER; note = thymine
  modified_base 348: mod_base = OTHER; note = thymine
  modified_base 351: mod_base = OTHER; note = thymine
  modified_base 353..354: mod_base = OTHER; note = thymine
  modified_base 357: mod_base = OTHER; note = thymine
  modified_base 360: mod_base = OTHER; note = thymine
  modified_base 365..366: mod_base = OTHER; note = thymine
  modified_base 369: mod_base = OTHER; note = thymine
  modified_base 372: mod_base = OTHER; note = thymine
  modified_base 374..375: mod_base = OTHER; note = thymine
  modified_base 379: mod_base = OTHER; note = thymine
  modified_base 382: mod_base = OTHER; note = thymine
  modified_base 384: mod_base = OTHER; note = thymine
  modified_base 387: mod_base = OTHER; note = thymine
  modified_base 389..390: mod_base = OTHER; note = thymine
  modified_base 392..393: mod_base = OTHER; note = thymine
  modified_base 395..396: mod_base = OTHER; note = thymine
  modified_base 399: mod_base = OTHER; note = thymine
  modified_base 401..402: mod_base = OTHER; note = thymine
  modified_base 404..405: mod_base = OTHER; note = thymine
  modified_base 411: mod_base = OTHER; note = thymine
  modified_base 414: mod_base = OTHER; note = thymine
  modified_base 417..418: mod_base = OTHER; note = thymine
  modified_base 420: mod_base = OTHER; note = thymine
  modified_base 422..424: mod_base = OTHER; note = thymine
  modified_base 426: mod_base = OTHER; note = thymine
  modified_base 432: mod_base = OTHER; note = thymine
  modified_base 438: mod_base = OTHER; note = thymine
  modified_base 444: mod_base = OTHER; note = thymine
  modified_base 450: mod_base = OTHER; note = thymine
  modified_base 453: mod_base = OTHER; note = thymine
  modified_base 456: mod_base = OTHER; note = thymine
  modified_base 464..465: mod_base = OTHER; note = thymine
  modified_base 468: mod_base = OTHER; note = thymine
  modified_base 471: mod_base = OTHER; note = thymine
  modified_base 473..474: mod_base = OTHER; note = thymine
  modified_base 476..477: mod_base = OTHER; note = thymine
  modified_base 483: mod_base = OTHER; note = thymine
  modified_base 485..486: mod_base = OTHER; note = thymine
  modified_base 489: mod_base = OTHER; note = thymine
  modified_base 492: mod_base = OTHER; note = thymine
  modified_base 495: mod_base = OTHER; note = thymine
  modified_base 498: mod_base = OTHER; note = thymine
  modified_base 501: mod_base = OTHER; note = thymine
  modified_base 504: mod_base = OTHER; note = thymine
  modified_base 506..507: mod_base = OTHER; note = thymine
  modified_base 513: mod_base = OTHER; note = thymine
  modified_base 516: mod_base = OTHER; note = thymine
  modified_base 519..522: mod_base = OTHER; note = thymine
  modified_base 525: mod_base = OTHER; note = thymine
  modified_base 528: mod_base = OTHER; note = thymine
  modified_base 531: mod_base = OTHER; note = thymine
  modified_base 534: mod_base = OTHER; note = thymine
  modified_base 539..540: mod_base = OTHER; note = thymine
  modified_base 543: mod_base = OTHER; note = thymine
  modified_base 545..546: mod_base = OTHER; note = thymine
  modified_base 549: mod_base = OTHER; note = thymine
  modified_base 553..555: mod_base = OTHER; note = thymine
  modified_base 565: mod_base = OTHER; note = thymine
  modified_base 567: mod_base = OTHER; note = thymine
  modified_base 570: mod_base = OTHER; note = thymine
  modified_base 573: mod_base = OTHER; note = thymine
  modified_base 575..576: mod_base = OTHER; note = thymine
  modified_base 579: mod_base = OTHER; note = thymine
  modified_base 582: mod_base = OTHER; note = thymine
  modified_base 588: mod_base = OTHER; note = thymine
  modified_base 591: mod_base = OTHER; note = thymine
  modified_base 594..595: mod_base = OTHER; note = thymine
  modified_base 597..598: mod_base = OTHER; note = thymine
  modified_base 600: mod_base = OTHER; note = thymine
  modified_base 603: mod_base = OTHER; note = thymine
  modified_base 606..610: mod_base = OTHER; note = thymine
  modified_base 612: mod_base = OTHER; note = thymine
  modified_base 615: mod_base = OTHER; note = thymine
  modified_base 621: mod_base = OTHER; note = thymine
  modified_base 623..624: mod_base = OTHER; note = thymine
  modified_base 630: mod_base = OTHER; note = thymine
  modified_base 635..636: mod_base = OTHER; note = thymine
  modified_base 639: mod_base = OTHER; note = thymine
  modified_base 641..642: mod_base = OTHER; note = thymine
  modified_base 644..648: mod_base = OTHER; note = thymine
  modified_base 664..666: mod_base = OTHER; note = thymine
  modified_base 669: mod_base = OTHER; note = thymine
  modified_base 672: mod_base = OTHER; note = thymine
  modified_base 675: mod_base = OTHER; note = thymine
  modified_base 678: mod_base = OTHER; note = thymine
  modified_base 680..682: mod_base = OTHER; note = thymine
  modified_base 684: mod_base = OTHER; note = thymine
  modified_base 687: mod_base = OTHER; note = thymine
  modified_base 690: mod_base = OTHER; note = thymine
  modified_base 692..693: mod_base = OTHER; note = thymine
  modified_base 702: mod_base = OTHER; note = thymine
  modified_base 704..705: mod_base = OTHER; note = thymine
  modified_base 711: mod_base = OTHER; note = thymine
  modified_base 713..714: mod_base = OTHER; note = thymine
  modified_base 716..717: mod_base = OTHER; note = thymine
  modified_base 719: mod_base = OTHER; note = thymine
  modified_base 723: mod_base = OTHER; note = thymine
  modified_base 729: mod_base = OTHER; note = thymine
  modified_base 732: mod_base = OTHER; note = thymine
  modified_base 735: mod_base = OTHER; note = thymine
  modified_base 737..739: mod_base = OTHER; note = thymine
  modified_base 741: mod_base = OTHER; note = thymine
  modified_base 744: mod_base = OTHER; note = thymine
  modified_base 747: mod_base = OTHER; note = thymine
  modified_base 750: mod_base = OTHER; note = thymine
  modified_base 752..753: mod_base = OTHER; note = thymine
  modified_base 761: mod_base = OTHER; note = thymine
  modified_base 764..765: mod_base = OTHER; note = thymine
  modified_base 768: mod_base = OTHER; note = thymine
  modified_base 771..772: mod_base = OTHER; note = thymine
  modified_base 774: mod_base = OTHER; note = thymine
  modified_base 777..780: mod_base = OTHER; note = thymine
  modified_base 786: mod_base = OTHER; note = thymine
  modified_base 789: mod_base = OTHER; note = thymine
  modified_base 795: mod_base = OTHER; note = thymine
  modified_base 801: mod_base = OTHER; note = thymine
  modified_base 804: mod_base = OTHER; note = thymine
  modified_base 810: mod_base = OTHER; note = thymine
  modified_base 813..814: mod_base = OTHER; note = thymine
  modified_base 816: mod_base = OTHER; note = thymine
  modified_base 819: mod_base = OTHER; note = thymine
  modified_base 822: mod_base = OTHER; note = thymine
  modified_base 828..831: mod_base = OTHER; note = thymine
  modified_base 833..835: mod_base = OTHER; note = thymine
  modified_base 839..840: mod_base = OTHER; note = thymine
  modified_base 843: mod_base = OTHER; note = thymine
  modified_base 848..849: mod_base = OTHER; note = thymine
  modified_base 852: mod_base = OTHER; note = thymine
  modified_base 855: mod_base = OTHER; note = thymine
  modified_base 857..858: mod_base = OTHER; note = thymine
  modified_base 861: mod_base = OTHER; note = thymine
  modified_base 863..864: mod_base = OTHER; note = thymine
  modified_base 866..867: mod_base = OTHER; note = thymine
  modified_base 876..877: mod_base = OTHER; note = thymine
  modified_base 879: mod_base = OTHER; note = thymine
  modified_base 885: mod_base = OTHER; note = thymine
  modified_base 888: mod_base = OTHER; note = thymine
  modified_base 890..891: mod_base = OTHER; note = thymine
  modified_base 894: mod_base = OTHER; note = thymine
  modified_base 897: mod_base = OTHER; note = thymine
  modified_base 900: mod_base = OTHER; note = thymine
  modified_base 906: mod_base = OTHER; note = thymine
  modified_base 909: mod_base = OTHER; note = thymine
  modified_base 912: mod_base = OTHER; note = thymine
  modified_base 914..915: mod_base = OTHER; note = thymine
  modified_base 917: mod_base = OTHER; note = thymine
  modified_base 921: mod_base = OTHER; note = thymine
  modified_base 927..928: mod_base = OTHER; note = thymine
  modified_base 930: mod_base = OTHER; note = thymine
  modified_base 933: mod_base = OTHER; note = thymine
  modified_base 937: mod_base = OTHER; note = thymine
  modified_base 939: mod_base = OTHER; note = thymine
  modified_base 944..945: mod_base = OTHER; note = thymine
  modified_base 948..949: mod_base = OTHER; note = thymine
  modified_base 951: mod_base = OTHER; note = thymine
  modified_base 954: mod_base = OTHER; note = thymine
  modified_base 960: mod_base = OTHER; note = thymine
  modified_base 963: mod_base = OTHER; note = thymine
  modified_base 968..969: mod_base = OTHER; note = thymine
  modified_base 971..973: mod_base = OTHER; note = thymine
  modified_base 975: mod_base = OTHER; note = thymine
  modified_base 977..978: mod_base = OTHER; note = thymine
  modified_base 984: mod_base = OTHER; note = thymine
  modified_base 987: mod_base = OTHER; note = thymine
  modified_base 990..996: mod_base = OTHER; note = thymine
  modified_base 1002: mod_base = OTHER; note = thymine
  modified_base 1004..1005: mod_base = OTHER; note = thymine
  modified_base 1008..1009: mod_base = OTHER; note = thymine
  modified_base 1011: mod_base = OTHER; note = thymine
  modified_base 1014: mod_base = OTHER; note = thymine
  modified_base 1020: mod_base = OTHER; note = thymine
  modified_base 1023: mod_base = OTHER; note = thymine
  modified_base 1026: mod_base = OTHER; note = thymine
  modified_base 1032..1033: mod_base = OTHER; note = thymine
  modified_base 1035: mod_base = OTHER; note = thymine
  modified_base 1038: mod_base = OTHER; note = thymine
  modified_base 1040..1041: mod_base = OTHER; note = thymine
  modified_base 1043: mod_base = OTHER; note = thymine
  modified_base 1049: mod_base = OTHER; note = thymine
  modified_base 1056..1057: mod_base = OTHER; note = thymine
  modified_base 1059: mod_base = OTHER; note = thymine
  modified_base 1062: mod_base = OTHER; note = thymine
  modified_base 1065: mod_base = OTHER; note = thymine
  modified_base 1067..1069: mod_base = OTHER; note = thymine
  modified_base 1071: mod_base = OTHER; note = thymine
  modified_base 1074: mod_base = OTHER; note = thymine
  modified_base 1077: mod_base = OTHER; note = thymine
  modified_base 1079..1080: mod_base = OTHER; note = thymine
  modified_base 1092: mod_base = OTHER; note = thymine
  modified_base 1094..1095: mod_base = OTHER; note = thymine
  modified_base 1101: mod_base = OTHER; note = thymine
  modified_base 1108: mod_base = OTHER; note = thymine
  modified_base 1110: mod_base = OTHER; note = thymine
  modified_base 1113: mod_base = OTHER; note = thymine
  modified_base 1115..1116: mod_base = OTHER; note = thymine
  modified_base 1119: mod_base = OTHER; note = thymine
  modified_base 1121..1123: mod_base = OTHER; note = thymine
  modified_base 1125: mod_base = OTHER; note = thymine
  modified_base 1128: mod_base = OTHER; note = thymine
  modified_base 1133..1134: mod_base = OTHER; note = thymine
  modified_base 1140: mod_base = OTHER; note = thymine
  modified_base 1145..1146: mod_base = OTHER; note = thymine
  modified_base 1149: mod_base = OTHER; note = thymine
  modified_base 1152: mod_base = OTHER; note = thymine
  modified_base 1155..1159: mod_base = OTHER; note = thymine
  modified_base 1161: mod_base = OTHER; note = thymine
  modified_base 1163..1167: mod_base = OTHER; note = thymine
  modified_base 1173: mod_base = OTHER; note = thymine
  modified_base 1176: mod_base = OTHER; note = thymine
  modified_base 1182: mod_base = OTHER; note = thymine
  modified_base 1184..1185: mod_base = OTHER; note = thymine
  modified_base 1188: mod_base = OTHER; note = thymine
  modified_base 1191: mod_base = OTHER; note = thymine
  modified_base 1194: mod_base = OTHER; note = thymine
  modified_base 1196..1197: mod_base = OTHER; note = thymine
  modified_base 1203: mod_base = OTHER; note = thymine
  modified_base 1206: mod_base = OTHER; note = thymine
  modified_base 1208..1209: mod_base = OTHER; note = thymine
  modified_base 1215: mod_base = OTHER; note = thymine
  modified_base 1220..1221: mod_base = OTHER; note = thymine
  modified_base 1223..1224: mod_base = OTHER; note = thymine
  modified_base 1230: mod_base = OTHER; note = thymine
  modified_base 1232..1233: mod_base = OTHER; note = thymine
  modified_base 1235..1236: mod_base = OTHER; note = thymine
  modified_base 1242: mod_base = OTHER; note = thymine
  modified_base 1244..1246: mod_base = OTHER; note = thymine
  modified_base 1248..1251: mod_base = OTHER; note = thymine
  modified_base 1254: mod_base = OTHER; note = thymine
  modified_base 1258..1260: mod_base = OTHER; note = thymine
  modified_base 1262..1263: mod_base = OTHER; note = thymine
  modified_base 1268..1270: mod_base = OTHER; note = thymine
  modified_base 1272: mod_base = OTHER; note = thymine
  modified_base 1274..1275: mod_base = OTHER; note = thymine
  modified_base 1281: mod_base = OTHER; note = thymine
  modified_base 1283..1284: mod_base = OTHER; note = thymine
  modified_base 1287: mod_base = OTHER; note = thymine
  modified_base 1290: mod_base = OTHER; note = thymine
  modified_base 1292..1293: mod_base = OTHER; note = thymine
  modified_base 1295..1296: mod_base = OTHER; note = thymine
  modified_base 1299: mod_base = OTHER; note = thymine
  modified_base 1301..1302: mod_base = OTHER; note = thymine
  modified_base 1304: mod_base = OTHER; note = thymine
  modified_base 1314: mod_base = OTHER; note = thymine
  modified_base 1320..1321: mod_base = OTHER; note = thymine
  modified_base 1323: mod_base = OTHER; note = thymine
  modified_base 1326: mod_base = OTHER; note = thymine
  modified_base 1332..1333: mod_base = OTHER; note = thymine
  modified_base 1335: mod_base = OTHER; note = thymine
  modified_base 1338: mod_base = OTHER; note = thymine
  modified_base 1343..1345: mod_base = OTHER; note = thymine
  modified_base 1347: mod_base = OTHER; note = thymine
  modified_base 1350: mod_base = OTHER; note = thymine
  modified_base 1353: mod_base = OTHER; note = thymine
  modified_base 1356..1357: mod_base = OTHER; note = thymine
  modified_base 1359: mod_base = OTHER; note = thymine
  modified_base 1362: mod_base = OTHER; note = thymine
  modified_base 1371: mod_base = OTHER; note = thymine
  modified_base 1374: mod_base = OTHER; note = thymine
  modified_base 1385..1387: mod_base = OTHER; note = thymine
  modified_base 1389: mod_base = OTHER; note = thymine
  modified_base 1391..1392: mod_base = OTHER; note = thymine
  modified_base 1395: mod_base = OTHER; note = thymine
  modified_base 1398: mod_base = OTHER; note = thymine
  modified_base 1400..1401: mod_base = OTHER; note = thymine
  modified_base 1404: mod_base = OTHER; note = thymine
  modified_base 1407: mod_base = OTHER; note = thymine
  modified_base 1410: mod_base = OTHER; note = thymine
  modified_base 1415..1416: mod_base = OTHER; note = thymine
  modified_base 1419: mod_base = OTHER; note = thymine
  modified_base 1422: mod_base = OTHER; note = thymine
  modified_base 1425: mod_base = OTHER; note = thymine
  modified_base 1427..1428: mod_base = OTHER; note = thymine
  modified_base 1430..1431: mod_base = OTHER; note = thymine
  modified_base 1433..1434: mod_base = OTHER; note = thymine
  modified_base 1437: mod_base = OTHER; note = thymine
  modified_base 1440: mod_base = OTHER; note = thymine
  modified_base 1442..1444: mod_base = OTHER; note = thymine
  modified_base 1446: mod_base = OTHER; note = thymine
  modified_base 1452: mod_base = OTHER; note = thymine
  modified_base 1455: mod_base = OTHER; note = thymine
  modified_base 1460..1461: mod_base = OTHER; note = thymine
  modified_base 1463..1464: mod_base = OTHER; note = thymine
  modified_base 1467: mod_base = OTHER; note = thymine
  modified_base 1470: mod_base = OTHER; note = thymine
  modified_base 1472..1473: mod_base = OTHER; note = thymine
  modified_base 1475..1476: mod_base = OTHER; note = thymine
  modified_base 1479: mod_base = OTHER; note = thymine
  modified_base 1482..1483: mod_base = OTHER; note = thymine
  modified_base 1485: mod_base = OTHER; note = thymine
  modified_base 1488..1489: mod_base = OTHER; note = thymine
  modified_base 1491: mod_base = OTHER; note = thymine
  modified_base 1494: mod_base = OTHER; note = thymine
  modified_base 1497: mod_base = OTHER; note = thymine
  modified_base 1500: mod_base = OTHER; note = thymine
  modified_base 1502..1503: mod_base = OTHER; note = thymine
  modified_base 1506: mod_base = OTHER; note = thymine
  modified_base 1508..1509: mod_base = OTHER; note = thymine
  modified_base 1515: mod_base = OTHER; note = thymine
  modified_base 1518: mod_base = OTHER; note = thymine
  modified_base 1521: mod_base = OTHER; note = thymine
  modified_base 1526..1527: mod_base = OTHER; note = thymine
  modified_base 1530: mod_base = OTHER; note = thymine
  modified_base 1534: mod_base = OTHER; note = thymine
  modified_base 1536..1539: mod_base = OTHER; note = thymine
  modified_base 1545: mod_base = OTHER; note = thymine
  modified_base 1548: mod_base = OTHER; note = thymine
  modified_base 1556..1557: mod_base = OTHER; note = thymine
  modified_base 1566: mod_base = OTHER; note = thymine
  modified_base 1578: mod_base = OTHER; note = thymine
  modified_base 1581: mod_base = OTHER; note = thymine
  modified_base 1587: mod_base = OTHER; note = thymine
  modified_base 1590: mod_base = OTHER; note = thymine
  modified_base 1599: mod_base = OTHER; note = thymine
  modified_base 1602: mod_base = OTHER; note = thymine
  modified_base 1605: mod_base = OTHER; note = thymine
  modified_base 1609..1611: mod_base = OTHER; note = thymine
  modified_base 1614: mod_base = OTHER; note = thymine
  modified_base 1618: mod_base = OTHER; note = thymine
  modified_base 1620..1623: mod_base = OTHER; note = thymine
  modified_base 1626: mod_base = OTHER; note = thymine
  modified_base 1629..1632: mod_base = OTHER; note = thymine
  modified_base 1634..1635: mod_base = OTHER; note = thymine
  modified_base 1638: mod_base = OTHER; note = thymine
  modified_base 1644: mod_base = OTHER; note = thymine
  modified_base 1648: mod_base = OTHER; note = thymine
  modified_base 1650: mod_base = OTHER; note = thymine
  modified_base 1656: mod_base = OTHER; note = thymine
  modified_base 1658..1659: mod_base = OTHER; note = thymine
  modified_base 1661..1662: mod_base = OTHER; note = thymine
  modified_base 1667..1668: mod_base = OTHER; note = thymine
  modified_base 1671: mod_base = OTHER; note = thymine
  modified_base 1673..1675: mod_base = OTHER; note = thymine
  modified_base 1677: mod_base = OTHER; note = thymine
  modified_base 1689: mod_base = OTHER; note = thymine
  modified_base 1692: mod_base = OTHER; note = thymine
  modified_base 1696: mod_base = OTHER; note = thymine
  modified_base 1698: mod_base = OTHER; note = thymine
  modified_base 1700..1702: mod_base = OTHER; note = thymine
  modified_base 1704..1705: mod_base = OTHER; note = thymine
  modified_base 1707: mod_base = OTHER; note = thymine
  modified_base 1710: mod_base = OTHER; note = thymine
  modified_base 1718..1719: mod_base = OTHER; note = thymine
  modified_base 1722: mod_base = OTHER; note = thymine
  modified_base 1724..1725: mod_base = OTHER; note = thymine
  modified_base 1728: mod_base = OTHER; note = thymine
  modified_base 1731: mod_base = OTHER; note = thymine
  modified_base 1733..1734: mod_base = OTHER; note = thymine
  modified_base 1737: mod_base = OTHER; note = thymine
  modified_base 1746..1747: mod_base = OTHER; note = thymine
  modified_base 1749: mod_base = OTHER; note = thymine
  modified_base 1751..1752: mod_base = OTHER; note = thymine
  modified_base 1757..1758: mod_base = OTHER; note = thymine
  modified_base 1761: mod_base = OTHER; note = thymine
  modified_base 1764: mod_base = OTHER; note = thymine
  modified_base 1767: mod_base = OTHER; note = thymine
  modified_base 1769..1770: mod_base = OTHER; note = thymine
  modified_base 1773..1777: mod_base = OTHER; note = thymine
  modified_base 1779: mod_base = OTHER; note = thymine
  modified_base 1782: mod_base = OTHER; note = thymine
  modified_base 1785..1786: mod_base = OTHER; note = thymine
  modified_base 1791: mod_base = OTHER; note = thymine
  modified_base 1794..1795: mod_base = OTHER; note = thymine
  modified_base 1797..1800: mod_base = OTHER; note = thymine
  modified_base 1803: mod_base = OTHER; note = thymine
  modified_base 1806: mod_base = OTHER; note = thymine
  modified_base 1811..1812: mod_base = OTHER; note = thymine
  modified_base 1814..1815: mod_base = OTHER; note = thymine
  modified_base 1817..1818: mod_base = OTHER; note = thymine
  modified_base 1820..1821: mod_base = OTHER; note = thymine
  modified_base 1824..1825: mod_base = OTHER; note = thymine
  modified_base 1827: mod_base = OTHER; note = thymine
  modified_base 1833: mod_base = OTHER; note = thymine
  modified_base 1839: mod_base = OTHER; note = thymine
  modified_base 1845: mod_base = OTHER; note = thymine
  modified_base 1848: mod_base = OTHER; note = thymine
  modified_base 1854: mod_base = OTHER; note = thymine
  modified_base 1857..1858: mod_base = OTHER; note = thymine
  modified_base 1860: mod_base = OTHER; note = thymine
  modified_base 1864: mod_base = OTHER; note = thymine
  modified_base 1866..1869: mod_base = OTHER; note = thymine
  modified_base 1872: mod_base = OTHER; note = thymine
  modified_base 1875: mod_base = OTHER; note = thymine
  modified_base 1881: mod_base = OTHER; note = thymine
  modified_base 1884..1885: mod_base = OTHER; note = thymine
  modified_base 1887: mod_base = OTHER; note = thymine
  modified_base 1890: mod_base = OTHER; note = thymine
  modified_base 1894: mod_base = OTHER; note = thymine
  modified_base 1903..1905: mod_base = OTHER; note = thymine
  modified_base 1911: mod_base = OTHER; note = thymine
  modified_base 1914: mod_base = OTHER; note = thymine
  modified_base 1916..1917: mod_base = OTHER; note = thymine
  modified_base 1923..1924: mod_base = OTHER; note = thymine
  modified_base 1926: mod_base = OTHER; note = thymine
  modified_base 1929..1932: mod_base = OTHER; note = thymine
  modified_base 1935: mod_base = OTHER; note = thymine
  modified_base 1938..1939: mod_base = OTHER; note = thymine
  modified_base 1941: mod_base = OTHER; note = thymine
  modified_base 1953: mod_base = OTHER; note = thymine
  modified_base 1955..1956: mod_base = OTHER; note = thymine
  modified_base 1958..1959: mod_base = OTHER; note = thymine
  modified_base 1961..1962: mod_base = OTHER; note = thymine
  modified_base 1969..1971: mod_base = OTHER; note = thymine
  modified_base 1974: mod_base = OTHER; note = thymine
  modified_base 1980: mod_base = OTHER; note = thymine
  modified_base 1983..1986: mod_base = OTHER; note = thymine
  modified_base 1995: mod_base = OTHER; note = thymine
  modified_base 1998: mod_base = OTHER; note = thymine
  modified_base 2000..2001: mod_base = OTHER; note = thymine
  modified_base 2004: mod_base = OTHER; note = thymine
  modified_base 2007: mod_base = OTHER; note = thymine
  modified_base 2010: mod_base = OTHER; note = thymine
  modified_base 2013..2014: mod_base = OTHER; note = thymine
  modified_base 2016: mod_base = OTHER; note = thymine
  modified_base 2018..2019: mod_base = OTHER; note = thymine
  modified_base 2022: mod_base = OTHER; note = thymine
  modified_base 2025..2028: mod_base = OTHER; note = thymine
  modified_base 2030..2032: mod_base = OTHER; note = thymine
  modified_base 2034: mod_base = OTHER; note = thymine
  modified_base 2038..2040: mod_base = OTHER; note = thymine
  modified_base 2042..2043: mod_base = OTHER; note = thymine
  modified_base 2046: mod_base = OTHER; note = thymine
  modified_base 2049: mod_base = OTHER; note = thymine
  modified_base 2052: mod_base = OTHER; note = thymine
  modified_base 2054: mod_base = OTHER; note = thymine
  modified_base 2058: mod_base = OTHER; note = thymine
  modified_base 2060..2061: mod_base = OTHER; note = thymine
  modified_base 2064: mod_base = OTHER; note = thymine
  modified_base 2067: mod_base = OTHER; note = thymine
  modified_base 2073: mod_base = OTHER; note = thymine
  modified_base 2082: mod_base = OTHER; note = thymine
  modified_base 2084..2088: mod_base = OTHER; note = thymine
  modified_base 2091..2092: mod_base = OTHER; note = thymine
  modified_base 2094: mod_base = OTHER; note = thymine
  modified_base 2097: mod_base = OTHER; note = thymine
  modified_base 2100: mod_base = OTHER; note = thymine
  modified_base 2105..2106: mod_base = OTHER; note = thymine
  modified_base 2109: mod_base = OTHER; note = thymine
  modified_base 2112: mod_base = OTHER; note = thymine
  modified_base 2114..2115: mod_base = OTHER; note = thymine
  modified_base 2117..2118: mod_base = OTHER; note = thymine
  modified_base 2121: mod_base = OTHER; note = thymine
  modified_base 2124..2128: mod_base = OTHER; note = thymine
  modified_base 2133: mod_base = OTHER; note = thymine
  modified_base 2135..2136: mod_base = OTHER; note = thymine
  modified_base 2139: mod_base = OTHER; note = thymine
  modified_base 2144..2145: mod_base = OTHER; note = thymine
  modified_base 2148: mod_base = OTHER; note = thymine
  modified_base 2151: mod_base = OTHER; note = thymine
  modified_base 2157: mod_base = OTHER; note = thymine
  modified_base 2160: mod_base = OTHER; note = thymine
  modified_base 2163: mod_base = OTHER; note = thymine
  modified_base 2166: mod_base = OTHER; note = thymine
  modified_base 2169: mod_base = OTHER; note = thymine
  modified_base 2172: mod_base = OTHER; note = thymine
  modified_base 2174..2175: mod_base = OTHER; note = thymine
  modified_base 2178: mod_base = OTHER; note = thymine
  modified_base 2181: mod_base = OTHER; note = thymine
  modified_base 2183..2184: mod_base = OTHER; note = thymine
  modified_base 2186..2187: mod_base = OTHER; note = thymine
  modified_base 2189..2190: mod_base = OTHER; note = thymine
  modified_base 2193..2194: mod_base = OTHER; note = thymine
  modified_base 2196..2197: mod_base = OTHER; note = thymine
  modified_base 2199: mod_base = OTHER; note = thymine
  modified_base 2202: mod_base = OTHER; note = thymine
  modified_base 2204..2205: mod_base = OTHER; note = thymine
  modified_base 2208: mod_base = OTHER; note = thymine
  modified_base 2210: mod_base = OTHER; note = thymine
  modified_base 2222..2223: mod_base = OTHER; note = thymine
  modified_base 2226: mod_base = OTHER; note = thymine
  modified_base 2229..2232: mod_base = OTHER; note = thymine
  modified_base 2234..2235: mod_base = OTHER; note = thymine
  modified_base 2238..2239: mod_base = OTHER; note = thymine
  modified_base 2241: mod_base = OTHER; note = thymine
  modified_base 2249: mod_base = OTHER; note = thymine
  modified_base 2253: mod_base = OTHER; note = thymine
  modified_base 2256..2259: mod_base = OTHER; note = thymine
  modified_base 2262: mod_base = OTHER; note = thymine
  modified_base 2265: mod_base = OTHER; note = thymine
  modified_base 2271: mod_base = OTHER; note = thymine
  modified_base 2273..2274: mod_base = OTHER; note = thymine
  modified_base 2277: mod_base = OTHER; note = thymine
  modified_base 2286: mod_base = OTHER; note = thymine
  modified_base 2289: mod_base = OTHER; note = thymine
  modified_base 2294..2295: mod_base = OTHER; note = thymine
  modified_base 2297..2298: mod_base = OTHER; note = thymine
  modified_base 2301: mod_base = OTHER; note = thymine
  modified_base 2310: mod_base = OTHER; note = thymine
  modified_base 2313..2316: mod_base = OTHER; note = thymine
  modified_base 2319: mod_base = OTHER; note = thymine
  modified_base 2325..2326: mod_base = OTHER; note = thymine
  modified_base 2332..2337: mod_base = OTHER; note = thymine
  modified_base 2340: mod_base = OTHER; note = thymine
  modified_base 2348..2349: mod_base = OTHER; note = thymine
  modified_base 2351: mod_base = OTHER; note = thymine
  modified_base 2354..2355: mod_base = OTHER; note = thymine
  modified_base 2358: mod_base = OTHER; note = thymine
  modified_base 2360..2364: mod_base = OTHER; note = thymine
  modified_base 2367: mod_base = OTHER; note = thymine
  modified_base 2373: mod_base = OTHER; note = thymine
  modified_base 2376: mod_base = OTHER; note = thymine
  modified_base 2379: mod_base = OTHER; note = thymine
  modified_base 2385: mod_base = OTHER; note = thymine
  modified_base 2389..2391: mod_base = OTHER; note = thymine
  modified_base 2400: mod_base = OTHER; note = thymine
  modified_base 2403: mod_base = OTHER; note = thymine
  modified_base 2406: mod_base = OTHER; note = thymine
  modified_base 2409: mod_base = OTHER; note = thymine
  modified_base 2417..2418: mod_base = OTHER; note = thymine
  modified_base 2421: mod_base = OTHER; note = thymine
  modified_base 2424: mod_base = OTHER; note = thymine
  modified_base 2426..2427: mod_base = OTHER; note = thymine
  modified_base 2429..2430: mod_base = OTHER; note = thymine
  modified_base 2433: mod_base = OTHER; note = thymine
  modified_base 2441..2443: mod_base = OTHER; note = thymine
  modified_base 2445..2446: mod_base = OTHER; note = thymine
  modified_base 2448: mod_base = OTHER; note = thymine
  modified_base 2451: mod_base = OTHER; note = thymine
  modified_base 2454: mod_base = OTHER; note = thymine
  modified_base 2460: mod_base = OTHER; note = thymine
  modified_base 2462..2463: mod_base = OTHER; note = thymine
  modified_base 2466: mod_base = OTHER; note = thymine
  modified_base 2470: mod_base = OTHER; note = thymine
  modified_base 2472: mod_base = OTHER; note = thymine
  modified_base 2474..2475: mod_base = OTHER; note = thymine
  modified_base 2478: mod_base = OTHER; note = thymine
  modified_base 2481: mod_base = OTHER; note = thymine
  modified_base 2483..2487: mod_base = OTHER; note = thymine
  modified_base 2489..2491: mod_base = OTHER; note = thymine
  modified_base 2493: mod_base = OTHER; note = thymine
  modified_base 2496: mod_base = OTHER; note = thymine
  modified_base 2499: mod_base = OTHER; note = thymine
  modified_base 2502: mod_base = OTHER; note = thymine
  modified_base 2505: mod_base = OTHER; note = thymine
  modified_base 2508: mod_base = OTHER; note = thymine
  modified_base 2513: mod_base = OTHER; note = thymine
  modified_base 2515: mod_base = OTHER; note = thymine
  modified_base 2517: mod_base = OTHER; note = thymine
  modified_base 2520: mod_base = OTHER; note = thymine
  modified_base 2526: mod_base = OTHER; note = thymine
  modified_base 2529: mod_base = OTHER; note = thymine
  modified_base 2531: mod_base = OTHER; note = thymine
  modified_base 2538: mod_base = OTHER; note = thymine
  modified_base 2540..2541: mod_base = OTHER; note = thymine
  modified_base 2545: mod_base = OTHER; note = thymine
  modified_base 2547: mod_base = OTHER; note = thymine
  modified_base 2550: mod_base = OTHER; note = thymine
  modified_base 2556: mod_base = OTHER; note = thymine
  modified_base 2558..2559: mod_base = OTHER; note = thymine
  modified_base 2562: mod_base = OTHER; note = thymine
  modified_base 2568: mod_base = OTHER; note = thymine
  modified_base 2570..2572: mod_base = OTHER; note = thymine
  modified_base 2574: mod_base = OTHER; note = thymine
  modified_base 2576..2577: mod_base = OTHER; note = thymine
  modified_base 2579..2580: mod_base = OTHER; note = thymine
  modified_base 2583: mod_base = OTHER; note = thymine
  modified_base 2585..2586: mod_base = OTHER; note = thymine
  modified_base 2589: mod_base = OTHER; note = thymine
  modified_base 2591..2592: mod_base = OTHER; note = thymine
  modified_base 2595: mod_base = OTHER; note = thymine
  modified_base 2600..2601: mod_base = OTHER; note = thymine
  modified_base 2606..2607: mod_base = OTHER; note = thymine
  modified_base 2613: mod_base = OTHER; note = thymine
  modified_base 2615..2616: mod_base = OTHER; note = thymine
  modified_base 2624: mod_base = OTHER; note = thymine
  modified_base 2627..2628: mod_base = OTHER; note = thymine
  modified_base 2631: mod_base = OTHER; note = thymine
  modified_base 2634: mod_base = OTHER; note = thymine
  modified_base 2640: mod_base = OTHER; note = thymine
  modified_base 2646: mod_base = OTHER; note = thymine
  modified_base 2651..2653: mod_base = OTHER; note = thymine
  modified_base 2655: mod_base = OTHER; note = thymine
  modified_base 2661: mod_base = OTHER; note = thymine
  modified_base 2663..2664: mod_base = OTHER; note = thymine
  modified_base 2670: mod_base = OTHER; note = thymine
  modified_base 2673: mod_base = OTHER; note = thymine
  modified_base 2675..2676: mod_base = OTHER; note = thymine
  modified_base 2682: mod_base = OTHER; note = thymine
  modified_base 2685: mod_base = OTHER; note = thymine
  modified_base 2691: mod_base = OTHER; note = thymine
  modified_base 2694: mod_base = OTHER; note = thymine
  modified_base 2697: mod_base = OTHER; note = thymine
  modified_base 2700: mod_base = OTHER; note = thymine
  modified_base 2706..2709: mod_base = OTHER; note = thymine
  modified_base 2712: mod_base = OTHER; note = thymine
  modified_base 2718..2722: mod_base = OTHER; note = thymine
  modified_base 2724: mod_base = OTHER; note = thymine
  modified_base 2728: mod_base = OTHER; note = thymine
  modified_base 2730: mod_base = OTHER; note = thymine
  modified_base 2733: mod_base = OTHER; note = thymine
  modified_base 2739: mod_base = OTHER; note = thymine
  modified_base 2742: mod_base = OTHER; note = thymine
  modified_base 2745: mod_base = OTHER; note = thymine
  modified_base 2748: mod_base = OTHER; note = thymine
  modified_base 2751: mod_base = OTHER; note = thymine
  modified_base 2759..2760: mod_base = OTHER; note = thymine
  modified_base 2766: mod_base = OTHER; note = thymine
  modified_base 2768..2769: mod_base = OTHER; note = thymine
  modified_base 2772: mod_base = OTHER; note = thymine
  modified_base 2774..2775: mod_base = OTHER; note = thymine
  modified_base 2783..2784: mod_base = OTHER; note = thymine
  modified_base 2793: mod_base = OTHER; note = thymine
  modified_base 2796: mod_base = OTHER; note = thymine
  modified_base 2798..2800: mod_base = OTHER; note = thymine
  modified_base 2804..2805: mod_base = OTHER; note = thymine
  modified_base 2808: mod_base = OTHER; note = thymine
  modified_base 2811: mod_base = OTHER; note = thymine
  modified_base 2814: mod_base = OTHER; note = thymine
  modified_base 2817: mod_base = OTHER; note = thymine
  modified_base 2820: mod_base = OTHER; note = thymine
  modified_base 2822..2823: mod_base = OTHER; note = thymine
  modified_base 2826: mod_base = OTHER; note = thymine
  modified_base 2829: mod_base = OTHER; note = thymine
  modified_base 2832: mod_base = OTHER; note = thymine
  modified_base 2835: mod_base = OTHER; note = thymine
  modified_base 2838: mod_base = OTHER; note = thymine
  modified_base 2840: mod_base = OTHER; note = thymine
  modified_base 2843..2844: mod_base = OTHER; note = thymine
  modified_base 2847: mod_base = OTHER; note = thymine
  modified_base 2849..2850: mod_base = OTHER; note = thymine
  modified_base 2853: mod_base = OTHER; note = thymine
  modified_base 2855..2859: mod_base = OTHER; note = thymine
  modified_base 2868: mod_base = OTHER; note = thymine
  modified_base 2871: mod_base = OTHER; note = thymine
  modified_base 2875: mod_base = OTHER; note = thymine
  modified_base 2877..2878: mod_base = OTHER; note = thymine
  modified_base 2880: mod_base = OTHER; note = thymine
  modified_base 2882..2883: mod_base = OTHER; note = thymine
  modified_base 2885..2886: mod_base = OTHER; note = thymine
  modified_base 2889: mod_base = OTHER; note = thymine
  modified_base 2891..2893: mod_base = OTHER; note = thymine
  modified_base 2895..2896: mod_base = OTHER; note = thymine
  modified_base 2898..2899: mod_base = OTHER; note = thymine
  modified_base 2906..2907: mod_base = OTHER; note = thymine
  modified_base 2910: mod_base = OTHER; note = thymine
  modified_base 2916: mod_base = OTHER; note = thymine
  modified_base 2918..2919: mod_base = OTHER; note = thymine
  modified_base 2921..2922: mod_base = OTHER; note = thymine
  modified_base 2925: mod_base = OTHER; note = thymine
  modified_base 2928: mod_base = OTHER; note = thymine
  modified_base 2931: mod_base = OTHER; note = thymine
  modified_base 2934: mod_base = OTHER; note = thymine
  modified_base 2936..2937: mod_base = OTHER; note = thymine
  modified_base 2939..2940: mod_base = OTHER; note = thymine
  modified_base 2943..2944: mod_base = OTHER; note = thymine
  modified_base 2946: mod_base = OTHER; note = thymine
  modified_base 2949: mod_base = OTHER; note = thymine
  modified_base 2952: mod_base = OTHER; note = thymine
  modified_base 2961..2962: mod_base = OTHER; note = thymine
  modified_base 2967: mod_base = OTHER; note = thymine
  modified_base 2969..2970: mod_base = OTHER; note = thymine
  modified_base 2972..2973: mod_base = OTHER; note = thymine
  modified_base 2976: mod_base = OTHER; note = thymine
  modified_base 2980: mod_base = OTHER; note = thymine
  modified_base 2982..2985: mod_base = OTHER; note = thymine
  modified_base 2988..2991: mod_base = OTHER; note = thymine
  modified_base 2995..2997: mod_base = OTHER; note = thymine
  modified_base 2999..3000: mod_base = OTHER; note = thymine
  modified_base 3002..3004: mod_base = OTHER; note = thymine
  modified_base 3006..3007: mod_base = OTHER; note = thymine
  modified_base 3009: mod_base = OTHER; note = thymine
  modified_base 3012: mod_base = OTHER; note = thymine
  modified_base 3015: mod_base = OTHER; note = thymine
  modified_base 3017..3018: mod_base = OTHER; note = thymine
  modified_base 3020..3021: mod_base = OTHER; note = thymine
  modified_base 3026..3027: mod_base = OTHER; note = thymine
  modified_base 3032..3033: mod_base = OTHER; note = thymine
  modified_base 3042..3043: mod_base = OTHER; note = thymine
  modified_base 3045..3048: mod_base = OTHER; note = thymine
  modified_base 3050..3051: mod_base = OTHER; note = thymine
  modified_base 3054..3055: mod_base = OTHER; note = thymine
  modified_base 3057..3061: mod_base = OTHER; note = thymine
  modified_base 3063: mod_base = OTHER; note = thymine
  modified_base 3066: mod_base = OTHER; note = thymine
  modified_base 3068..3069: mod_base = OTHER; note = thymine
  modified_base 3072: mod_base = OTHER; note = thymine
  modified_base 3075: mod_base = OTHER; note = thymine
  modified_base 3078: mod_base = OTHER; note = thymine
  modified_base 3081: mod_base = OTHER; note = thymine
  modified_base 3084: mod_base = OTHER; note = thymine
  modified_base 3087: mod_base = OTHER; note = thymine
  modified_base 3089..3091: mod_base = OTHER; note = thymine
  modified_base 3093: mod_base = OTHER; note = thymine
  modified_base 3095..3096: mod_base = OTHER; note = thymine
  modified_base 3099: mod_base = OTHER; note = thymine
  modified_base 3105: mod_base = OTHER; note = thymine
  modified_base 3108: mod_base = OTHER; note = thymine
  modified_base 3110..3111: mod_base = OTHER; note = thymine
  modified_base 3118: mod_base = OTHER; note = thymine
  modified_base 3120: mod_base = OTHER; note = thymine
  modified_base 3126: mod_base = OTHER; note = thymine
  modified_base 3132: mod_base = OTHER; note = thymine
  modified_base 3135: mod_base = OTHER; note = thymine
  modified_base 3137: mod_base = OTHER; note = thymine
  modified_base 3141: mod_base = OTHER; note = thymine
  modified_base 3144: mod_base = OTHER; note = thymine
  modified_base 3146..3147: mod_base = OTHER; note = thymine
  modified_base 3150: mod_base = OTHER; note = thymine
  modified_base 3152..3153: mod_base = OTHER; note = thymine
  modified_base 3159: mod_base = OTHER; note = thymine
  modified_base 3162: mod_base = OTHER; note = thymine
  modified_base 3164..3166: mod_base = OTHER; note = thymine
  modified_base 3168..3171: mod_base = OTHER; note = thymine
  modified_base 3178: mod_base = OTHER; note = thymine
  modified_base 3180: mod_base = OTHER; note = thymine
  modified_base 3185..3186: mod_base = OTHER; note = thymine
  modified_base 3189: mod_base = OTHER; note = thymine
  modified_base 3194: mod_base = OTHER; note = thymine
  modified_base 3198: mod_base = OTHER; note = thymine
  modified_base 3206..3207: mod_base = OTHER; note = thymine
  modified_base 3210: mod_base = OTHER; note = thymine
  modified_base 3213..3214: mod_base = OTHER; note = thymine
  modified_base 3216: mod_base = OTHER; note = thymine
  modified_base 3219: mod_base = OTHER; note = thymine
  modified_base 3221..3222: mod_base = OTHER; note = thymine
  modified_base 3231: mod_base = OTHER; note = thymine
  modified_base 3234: mod_base = OTHER; note = thymine
  modified_base 3237: mod_base = OTHER; note = thymine
  modified_base 3239..3240: mod_base = OTHER; note = thymine
  modified_base 3243: mod_base = OTHER; note = thymine
  misc_feature 1..3246: note = Synthetic
  source 1..3246: mol_type = other RNA
atggctgcttttaagcctaatcctattaattatattcttggtcttgatattggtattgcttctgttggttgggctatggttgagattgatgaggaggagaatcctattcgtcttattgatcttggtgttcgtgtttttgagcgtgctgaggttcctaagactggtgattctcttgctatggctcgtcgtcttgctcgttctgttcgtcgtcttactcgtcgtcgtgctcatcgtcttcttcgtgctcgtcgtcttcttaagcgtgagggtgttcttcaggctgctgattttgatgagaatggtcttattaagtctcttcctaatactccttggcagcttcgtgctgctgctcttgatcgtaagcttactcctcttgagtggtctgctgttcttcttcatcttattaagcatcgtggttatctttctcagcgtaagaatgagggtgagactgctgataaggagcttggtgctcttcttaagggtgttgctgataatgctcatgctcttcagactggtgattttcgtactcctgctgagcttgctcttaataagtttgagaaggagtgtggtcatattcgtaatcagcgtggtgattattctcatactttttctcgtaaggatcttcaggctgagcttaatcttctttttgagaagcagaaggagtttggtaatcctcatgtttctggtggtcttaaggagggtattgagactcttcttatgactcagcgtcctgctctttctggtgatgctgttcagaagatgcttggtcattgtacttttgagcctgctgagcctaaggctgctaagaatacttatactgctgagcgttttatttggcttactaagcttaataatcttcgtattcttgagcagggttctgagcgtcctcttactgatactgagcgtgctactcttatggatgagccttatcgtaagtctaagcttacttatgctcaggctcgtaagcttctttctcttgaggatactgctttttttaagggtcttcgttatggtaaggataatgctgaggcttctactcttatggagatgaaggcttatcatactatttctcgtgctcttgagaaggagggtcttaaggataagaagtctcctcttaatctttctcctgagcttcaggatgagattggtactgctttttctctttttaagactgatgaggatattactggtcgtcttaaggatcgtattcagcctgagattcttgaggctcttcttaagcatatttcttttgataagtttgttcagatttctcttaaggctcttcgtcgtattgttcctcttatggagcagggtaagcgttatgatgaggcttgtgctgagatttatggtgatcattatggtaagaagaatactgaggagaagatttatcttcctcctattcctgctgatgagattcgtaatcctgttgttcttcgtgctctttctcaggctcgtaaggttattaatggtgttgttcgtcgttatggttctcctgctcgtattcatattgagactgctcgtgaggttggtaagtcttttaaggatcgtaaggagattgagaagcgtcaggaggagaatcgtaaggatcgtgagaaggctgctgctaagtttcgtgagtattttcctaattttgttggtgagcctaagtctaaggatattcttaagcttcgtctttatgagcagcagcatggtaagtgtctttattctggtaaggagattaatcttggtcgtcttaatgagaagggttatgttgagattgatgctgctcttcctttttctcgtacttgggatgattcttttaataataaggttcttgttcttggttctgagaatcagaataagggtaatcagactccttatgagtattttaatggtaaggataattctcgtgagtggcaggagtttaaggctcgtgttgagacttctcgttttcctcgttctaagaagcagcgtattcttcttcagaagtttgatgaggatggttttaaggagcgtaatcttaatgatactcgttatgttaatcgttttctttgtcagtttgttgctgatcgtatgcgtcttactggtaagggtaagaagcgtgtttttgcttctaatggtcagattactaatcttcttcgtggtttttggggtcttcgtaaggttcgtgctgagaatgatcgtcatcatgctcttgatgctgttgttgttgcttgttctactgttgctatgcagcagaagattactcgttttgttcgttataaggagatgaatgcttttgatggtaagactattgataaggagactggtgaggttcttcatcagaagactcattttcctcagccttgggagttttttgctcaggaggttatgattcgtgtttttggtaagcctgatggtaagcctgagtttgaggaggctgatactcctgagaagcttcgtactcttcttgctgagaagctttcttctcgtcctgaggctgttcatgagtatgttactcctctttttgtttctcgtgctcctaatcgtaagatgtctggtcagggtcatatggagactgttaagtctgctaagcgtcttgatgagggtgtttctgttcttcgtgttcctcttactcagcttaagcttaaggatcttgagaagatggttaatcgtgagcgtgagcctaagctttatgaggctcttaaggctcgtcttgaggctcataaggatgatcctgctaaggcttttgctgagcctttttataagtatgataaggctggtaatcgtactcagcaggttaaggctgttcgtgttgagcaggttcagaagactggtgtttgggttcgtaatcataatggtattgctgataatgctactatggttcgtgttgatgtttttgagaagggtgataagtattatcttgttcctatttattcttggcaggttgctaagggtattcttcctgatcgtgctgttgttgcttatgctgatgaggaggattggactgttattgatgagtcttttcgttttaagtttgttctttattctaatgatcttattaaggttcagcttaagaaggattcttttcttggttatttttctggtcttgatcgtgctactggtgctatttctcttcgtgagcatgatcttgagaagtctaagggtaaggatggtatgcatcgtattggtgttaagactgctctttcttttcagaagtatcagattgatgagatgggtaaggagattcgtccttgtcgtcttaagaagcgtcctcctgttcgttga

SEQ ID NO: 302 - RNA, 3246 nt, synthetic construct
  modified_base 2: mod_base = OTHER; note = thymine
  modified_base 10..11: mod_base = OTHER; note = thymine
  modified_base 26: mod_base = OTHER; note = thymine
  modified_base 31: mod_base = OTHER; note = thymine
  modified_base 35: mod_base = OTHER; note = thymine
  modified_base 38: mod_base = OTHER; note = thymine
  modified_base 44: mod_base = OTHER; note = thymine
  modified_base 50: mod_base = OTHER; note = thymine
  modified_base 56: mod_base = OTHER; note = thymine
  modified_base 61: mod_base = OTHER; note = thymine
  modified_base 65: mod_base = OTHER; note = thymine
  modified_base 70: mod_base = OTHER; note = thymine
  modified_base 77: mod_base = OTHER; note = thymine
  modified_base 80: mod_base = OTHER; note = thymine
  modified_base 86: mod_base = OTHER; note = thymine
  modified_base 107: mod_base = OTHER; note = thymine
  modified_base 113: mod_base = OTHER; note = thymine
  modified_base 116: mod_base = OTHER; note = thymine
  modified_base 122: mod_base = OTHER; note = thymine
  modified_base 128: mod_base = OTHER; note = thymine
  modified_base 134: mod_base = OTHER; note = thymine
  modified_base 136..137: mod_base = OTHER; note = thymine
  modified_base 152: mod_base = OTHER; note = thymine
  modified_base 169: mod_base = OTHER; note = thymine
  modified_base 173: mod_base = OTHER; note = thymine
  modified_base 179: mod_base = OTHER; note = thymine
  modified_base 191: mod_base = OTHER; note = thymine
  modified_base 199: mod_base = OTHER; note = thymine
  modified_base 203: mod_base = OTHER; note = thymine
  modified_base 212: mod_base = OTHER; note = thymine
  modified_base 236: mod_base = OTHER; note = thymine
  modified_base 239: mod_base = OTHER; note = thymine
  modified_base 254: mod_base = OTHER; note = thymine
  modified_base 257: mod_base = OTHER; note = thymine
  modified_base 272: mod_base = OTHER; note = thymine
  modified_base 275: mod_base = OTHER; note = thymine
  modified_base 289..290: mod_base = OTHER; note = thymine
  modified_base 305: mod_base = OTHER; note = thymine
  modified_base 308: mod_base = OTHER; note = thymine
  modified_base 313: mod_base = OTHER; note = thymine
  modified_base 317: mod_base = OTHER; note = thymine
  modified_base 331: mod_base = OTHER; note = thymine
  modified_base 338: mod_base = OTHER; note = thymine
  modified_base 353: mod_base = OTHER; note = thymine
  modified_base 365: mod_base = OTHER; note = thymine
  modified_base 374: mod_base = OTHER; note = thymine
  modified_base 379: mod_base = OTHER; note = thymine
  modified_base 382: mod_base = OTHER; note = thymine
  modified_base 389: mod_base = OTHER; note = thymine
  modified_base 392: mod_base = OTHER; note = thymine
  modified_base 395: mod_base = OTHER; note = thymine
  modified_base 401: mod_base = OTHER; note = thymine
  modified_base 404: mod_base = OTHER; note = thymine
  modified_base 418: mod_base = OTHER; note = thymine
  modified_base 422: mod_base = OTHER; note = thymine
  modified_base 424: mod_base = OTHER; note = thymine
  modified_base 464: mod_base = OTHER; note = thymine
  modified_base 473: mod_base = OTHER; note = thymine
  modified_base 476: mod_base = OTHER; note = thymine
  modified_base 485: mod_base = OTHER; note = thymine
  modified_base 506: mod_base = OTHER; note = thymine
  modified_base 520..521: mod_base = OTHER; note = thymine
  modified_base 539: mod_base = OTHER; note = thymine
  modified_base 545: mod_base = OTHER; note = thymine
  modified_base 553..554: mod_base = OTHER; note = thymine
  modified_base 565: mod_base = OTHER; note = thymine
  modified_base 575: mod_base = OTHER; note = thymine
  modified_base 595: mod_base = OTHER; note = thymine
  modified_base 598: mod_base = OTHER; note = thymine
  modified_base 607..608: mod_base = OTHER; note = thymine
  modified_base 610: mod_base = OTHER; note = thymine
  modified_base 623: mod_base = OTHER; note = thymine
  modified_base 635: mod_base = OTHER; note = thymine
  modified_base 641: mod_base = OTHER; note = thymine
  modified_base 644: mod_base = OTHER; note = thymine
  modified_base 646..647: mod_base = OTHER; note = thymine
  modified_base 664..665: mod_base = OTHER; note = thymine
  modified_base 680: mod_base = OTHER; note = thymine
  modified_base 682: mod_base = OTHER; note = thymine
  modified_base 692: mod_base = OTHER; note = thymine
  modified_base 704: mod_base = OTHER; note = thymine
  modified_base 713: mod_base = OTHER; note = thymine
  modified_base 716: mod_base = OTHER; note = thymine
  modified_base 719: mod_base = OTHER; note = thymine
  modified_base 737: mod_base = OTHER; note = thymine
  modified_base 739: mod_base = OTHER; note = thymine
  modified_base 752: mod_base = OTHER; note = thymine
  modified_base 761: mod_base = OTHER; note = thymine
  modified_base 764: mod_base = OTHER; note = thymine
  modified_base 772: mod_base = OTHER; note = thymine
  modified_base 778..779: mod_base = OTHER; note = thymine
  modified_base 814: mod_base = OTHER; note = thymine
  modified_base 829..830: mod_base = OTHER; note = thymine
  modified_base 833: mod_base = OTHER; note = thymine
  modified_base 835: mod_base = OTHER; note = thymine
  modified_base 839: mod_base = OTHER; note = thymine
  modified_base 848: mod_base = OTHER; note = thymine
  modified_base 857: mod_base = OTHER; note = thymine
  modified_base 863: mod_base = OTHER; note = thymine
  modified_base 866: mod_base = OTHER; note = thymine
  modified_base 877: mod_base = OTHER; note = thymine
  modified_base 890: mod_base = OTHER; note = thymine
  modified_base 914: mod_base = OTHER; note = thymine
  modified_base 917: mod_base = OTHER; note = thymine
  modified_base 928: mod_base = OTHER; note = thymine
  modified_base 937: mod_base = OTHER; note = thymine
  modified_base 944: mod_base = OTHER; note = thymine
  modified_base 949: mod_base = OTHER; note = thymine
  modified_base 968: mod_base = OTHER; note = thymine
  modified_base 971: mod_base = OTHER; note = thymine
  modified_base 973: mod_base = OTHER; note = thymine
  modified_base 977: mod_base = OTHER; note = thymine
  modified_base 991..992: mod_base = OTHER; note = thymine
  modified_base 994..995: mod_base = OTHER; note = thymine
  modified_base 1004: mod_base = OTHER; note = thymine
  modified_base 1009: mod_base = OTHER; note = thymine
  modified_base 1033: mod_base = OTHER; note = thymine
  modified_base 1040: mod_base = OTHER; note = thymine
  modified_base 1043: mod_base = OTHER; note = thymine
  modified_base 1049: mod_base = OTHER; note = thymine
  modified_base 1057: mod_base = OTHER; note = thymine
  modified_base 1067: mod_base = OTHER; note = thymine
  modified_base 1069: mod_base = OTHER; note = thymine
  modified_base 1079: mod_base = OTHER; note = thymine
  modified_base 1094: mod_base = OTHER; note = thymine
  modified_base 1108: mod_base = OTHER; note = thymine
  modified_base 1115: mod_base = OTHER; note = thymine
  modified_base 1121: mod_base = OTHER; note = thymine
  modified_base 1123: mod_base = OTHER; note = thymine
  modified_base 1133: mod_base = OTHER; note = thymine
  modified_base 1145: mod_base = OTHER; note = thymine
  modified_base 1156..1157: mod_base = OTHER; note = thymine
  modified_base 1159: mod_base = OTHER; note = thymine
  modified_base 1163: mod_base = OTHER; note = thymine
  modified_base 1165..1166: mod_base = OTHER; note = thymine
  modified_base 1184: mod_base = OTHER; note = thymine
  modified_base 1196: mod_base = OTHER; note = thymine
  modified_base 1208: mod_base = OTHER; note = thymine
  modified_base 1220: mod_base = OTHER; note = thymine
  modified_base 1223: mod_base = OTHER; note = thymine
  modified_base 1232: mod_base = OTHER; note = thymine
  modified_base 1235: mod_base = OTHER; note = thymine
  modified_base 1244: mod_base = OTHER; note = thymine
  modified_base 1246: mod_base = OTHER; note = thymine
  modified_base 1249..1250: mod_base = OTHER; note = thymine
  modified_base 1258..1259: mod_base = OTHER; note = thymine
  modified_base 1262: mod_base = OTHER; note = thymine
  modified_base 1268: mod_base = OTHER; note = thymine
  modified_base 1270: mod_base = OTHER; note = thymine
  modified_base 1274: mod_base = OTHER; note = thymine
  modified_base 1283: mod_base = OTHER; note = thymine
  modified_base 1292: mod_base = OTHER; note = thymine
  modified_base 1295: mod_base = OTHER; note = thymine
  modified_base 1301: mod_base = OTHER; note = thymine
  modified_base 1304: mod_base = OTHER; note = thymine
  modified_base 1321: mod_base = OTHER; note = thymine
  modified_base 1333: mod_base = OTHER; note = thymine
  modified_base 1343: mod_base = OTHER; note = thymine
  modified_base 1345: mod_base = OTHER; note = thymine
  modified_base 1357: mod_base = OTHER; note = thymine
  modified_base 1385: mod_base = OTHER; note = thymine
  modified_base 1387: mod_base = OTHER; note = thymine
  modified_base 1391: mod_base = OTHER; note = thymine
  modified_base 1400: mod_base = OTHER; note = thymine
  modified_base 1415: mod_base = OTHER; note = thymine
  modified_base 1427: mod_base = OTHER; note = thymine
  modified_base 1430: mod_base = OTHER; note = thymine
  modified_base 1433: mod_base = OTHER; note = thymine
  modified_base 1442: mod_base = OTHER; note = thymine
  modified_base 1444: mod_base = OTHER; note = thymine
  modified_base 1460: mod_base = OTHER; note = thymine
  modified_base 1463: mod_base = OTHER; note = thymine
  modified_base 1472: mod_base = OTHER; note = thymine
  modified_base 1475: mod_base = OTHER; note = thymine
  modified_base 1483: mod_base = OTHER; note = thymine
  modified_base 1489: mod_base = OTHER; note = thymine
  modified_base 1502: mod_base = OTHER; note = thymine
  modified_base 1508: mod_base = OTHER; note = thymine
  modified_base 1526: mod_base = OTHER; note = thymine
  modified_base 1534: mod_base = OTHER; note = thymine
  modified_base 1537..1538: mod_base = OTHER; note = thymine
  modified_base 1556: mod_base = OTHER; note = thymine
  modified_base 1609..1610: mod_base = OTHER; note = thymine
  modified_base 1618: mod_base = OTHER; note = thymine
  modified_base 1621..1622: mod_base = OTHER; note = thymine
  modified_base 1630..1631: mod_base = OTHER; note = thymine
  modified_base 1634: mod_base = OTHER; note = thymine
  modified_base 1648: mod_base = OTHER; note = thymine
  modified_base 1658: mod_base = OTHER; note = thymine
  modified_base 1661: mod_base = OTHER; note = thymine
  modified_base 1667: mod_base = OTHER; note = thymine
  modified_base 1673: mod_base = OTHER; note = thymine
  modified_base 1675: mod_base = OTHER; note = thymine
  modified_base 1696: mod_base = OTHER; note = thymine
  modified_base 1700: mod_base = OTHER; note = thymine
  modified_base 1702: mod_base = OTHER; note = thymine
  modified_base 1705: mod_base = OTHER; note = thymine
  modified_base 1718: mod_base = OTHER; note = thymine
  modified_base 1724: mod_base = OTHER; note = thymine
  modified_base 1733: mod_base = OTHER; note = thymine
  modified_base 1747: mod_base = OTHER; note = thymine
  modified_base 1751: mod_base = OTHER; note = thymine
  modified_base 1757: mod_base = OTHER; note = thymine
  modified_base 1769: mod_base = OTHER; note = thymine
  modified_base 1774..1775: mod_base = OTHER; note = thymine
  modified_base 1777: mod_base = OTHER; note = thymine
  modified_base 1786: mod_base = OTHER; note = thymine
  modified_base 1795: mod_base = OTHER; note = thymine
  modified_base 1798..1799: mod_base = OTHER; note = thymine
  modified_base 1811: mod_base = OTHER; note = thymine
  modified_base 1814: mod_base = OTHER; note = thymine
  modified_base 1817: mod_base = OTHER; note = thymine
  modified_base 1820: mod_base = OTHER; note = thymine
  modified_base 1825: mod_base = OTHER; note = thymine
  modified_base 1858: mod_base = OTHER; note = thymine
  modified_base 1864: mod_base = OTHER; note = thymine
  modified_base 1867..1868: mod_base = OTHER; note = thymine
  modified_base 1885: mod_base = OTHER; note = thymine
  modified_base 1894: mod_base = OTHER; note = thymine
  modified_base 1903..1904: mod_base = OTHER; note = thymine
  modified_base 1916: mod_base = OTHER; note = thymine
  modified_base 1924: mod_base = OTHER; note = thymine
  modified_base 1930..1931: mod_base = OTHER; note = thymine
  modified_base 1939: mod_base = OTHER; note = thymine
  modified_base 1955: mod_base = OTHER; note = thymine
  modified_base 1958: mod_base = OTHER; note = thymine
  modified_base 1961: mod_base = OTHER; note = thymine
  modified_base 1969..1970: mod_base = OTHER; note = thymine
  modified_base 1984..1985: mod_base = OTHER; note = thymine
  modified_base 2000: mod_base = OTHER; note = thymine
  modified_base 2014: mod_base = OTHER; note = thymine
  modified_base 2018: mod_base = OTHER; note = thymine
  modified_base 2026..2027: mod_base = OTHER; note = thymine
  modified_base 2030: mod_base = OTHER; note = thymine
  modified_base 2032: mod_base = OTHER; note = thymine
  modified_base 2038..2039: mod_base = OTHER; note = thymine
  modified_base 2042: mod_base = OTHER; note = thymine
  modified_base 2054: mod_base = OTHER; note = thymine
  modified_base 2060: mod_base = OTHER; note = thymine
  modified_base 2084: mod_base = OTHER; note = thymine
  modified_base 2086..2087: mod_base = OTHER; note = thymine
  modified_base 2092: mod_base = OTHER; note = thymine
  modified_base 2105: mod_base = OTHER; note = thymine
  modified_base 2114: mod_base = OTHER; note = thymine
  modified_base 2117: mod_base = OTHER; note = thymine
  modified_base 2125..2126: mod_base = OTHER; note = thymine
  modified_base 2128: mod_base = OTHER; note = thymine
  modified_base 2135: mod_base = OTHER; note = thymine
  modified_base 2144: mod_base = OTHER; note = thymine
  modified_base 2174: mod_base = OTHER; note = thymine
  modified_base 2183: mod_base = OTHER; note = thymine
  modified_base 2186: mod_base = OTHER; note = thymine
  modified_base 2189: mod_base = OTHER; note = thymine
  modified_base 2194: mod_base = OTHER; note = thymine
  modified_base 2197: mod_base = OTHER; note = thymine
  modified_base 2204: mod_base = OTHER; note = thymine
  modified_base 2210: mod_base = OTHER; note = thymine
  modified_base 2222: mod_base = OTHER; note = thymine
  modified_base 2230..2231: mod_base = OTHER; note = thymine
  modified_base 2234: mod_base = OTHER; note = thymine
  modified_base 2239: mod_base = OTHER; note = thymine
  modified_base 2249: mod_base = OTHER; note = thymine
  modified_base 2257..2258: mod_base = OTHER; note = thymine
  modified_base 2273: mod_base = OTHER; note = thymine
  modified_base 2294: mod_base = OTHER; note = thymine
  modified_base 2297: mod_base = OTHER; note = thymine
  modified_base 2314..2315: mod_base = OTHER; note = thymine
  modified_base 2326: mod_base = OTHER; note = thymine
  modified_base 2332..2333: mod_base = OTHER; note = thymine
  modified_base 2335..2336: mod_base = OTHER; note = thymine
  modified_base 2348: mod_base = OTHER; note = thymine
  modified_base 2351: mod_base = OTHER; note = thymine
  modified_base 2354: mod_base = OTHER; note = thymine
  modified_base 2360: mod_base = OTHER; note = thymine
  modified_base 2362..2363: mod_base = OTHER; note = thymine
  modified_base 2389..2390: mod_base = OTHER; note = thymine
  modified_base 2417: mod_base = OTHER; note = thymine
  modified_base 2426: mod_base = OTHER; note = thymine
  modified_base 2429: mod_base = OTHER; note = thymine
  modified_base 2441: mod_base = OTHER; note = thymine
  modified_base 2443: mod_base = OTHER; note = thymine
  modified_base 2446: mod_base = OTHER; note = thymine
  modified_base 2462: mod_base = OTHER; note = thymine
  modified_base 2470: mod_base = OTHER; note = thymine
  modified_base 2474: mod_base = OTHER; note = thymine
  modified_base 2483: mod_base = OTHER; note = thymine
  modified_base 2485..2486: mod_base = OTHER; note = thymine
  modified_base 2489: mod_base = OTHER; note = thymine
  modified_base 2491: mod_base = OTHER; note = thymine
  modified_base 2513: mod_base = OTHER; note = thymine
  modified_base 2515: mod_base = OTHER; note = thymine
  modified_base 2531: mod_base = OTHER; note = thymine
  modified_base 2540: mod_base = OTHER; note = thymine
  modified_base 2545: mod_base = OTHER; note = thymine
  modified_base 2558: mod_base = OTHER; note = thymine
  modified_base 2570: mod_base = OTHER; note = thymine
  modified_base 2572: mod_base = OTHER; note = thymine
  modified_base 2576: mod_base = OTHER; note = thymine
  modified_base 2579: mod_base = OTHER; note = thymine
  modified_base 2585: mod_base = OTHER; note = thymine
  modified_base 2591: mod_base = OTHER; note = thymine
  modified_base 2600: mod_base = OTHER; note = thymine
  modified_base 2606: mod_base = OTHER; note = thymine
  modified_base 2615: mod_base = OTHER; note = thymine
  modified_base 2624: mod_base = OTHER; note = thymine
  modified_base 2627: mod_base = OTHER; note = thymine
  modified_base 2651: mod_base = OTHER; note = thymine
  modified_base 2653: mod_base = OTHER; note = thymine
  modified_base 2663: mod_base = OTHER; note = thymine
  modified_base 2675: mod_base = OTHER; note = thymine
  modified_base 2707..2708: mod_base = OTHER; note = thymine
  modified_base 2719..2720: mod_base = OTHER; note = thymine
  modified_base 2722: mod_base = OTHER; note = thymine
  modified_base 2728: mod_base = OTHER; note = thymine
  modified_base 2759: mod_base = OTHER; note = thymine
  modified_base 2768: mod_base = OTHER; note = thymine
  modified_base 2774: mod_base = OTHER; note = thymine
  modified_base 2783: mod_base = OTHER; note = thymine
  modified_base 2798: mod_base = OTHER; note = thymine
  modified_base 2800: mod_base = OTHER; note = thymine
  modified_base 2804: mod_base = OTHER; note = thymine
  modified_base 2822: mod_base = OTHER; note = thymine
  modified_base 2840: mod_base = OTHER; note = thymine
  modified_base 2843: mod_base = OTHER; note = thymine
  modified_base 2849: mod_base = OTHER; note = thymine
  modified_base 2855: mod_base = OTHER; note = thymine
  modified_base 2857..2858: mod_base = OTHER; note = thymine
  modified_base 2875: mod_base = OTHER; note = thymine
  modified_base 2878: mod_base = OTHER; note = thymine
  modified_base 2882: mod_base = OTHER; note = thymine
  modified_base 2885: mod_base = OTHER; note = thymine
  modified_base 2891: mod_base = OTHER; note = thymine
  modified_base 2893: mod_base = OTHER; note = thymine
  modified_base 2896: mod_base = OTHER; note = thymine
  modified_base 2899: mod_base = OTHER; note = thymine
  modified_base 2906: mod_base = OTHER; note = thymine
  modified_base 2918: mod_base = OTHER; note = thymine
  modified_base 2921: mod_base = OTHER; note = thymine
  modified_base 2936: mod_base = OTHER; note = thymine
  modified_base 2939: mod_base = OTHER; note = thymine
  modified_base 2944: mod_base = OTHER; note = thymine
  modified_base 2962: mod_base = OTHER; note = thymine
  modified_base 2969: mod_base = OTHER; note = thymine
  modified_base 2972: mod_base = OTHER; note = thymine
  modified_base 2980: mod_base = OTHER; note = thymine
  modified_base 2983..2984: mod_base = OTHER; note = thymine
  modified_base 2989..2990: mod_base = OTHER; note = thymine
  modified_base 2995..2996: mod_base = OTHER; note = thymine
  modified_base 2999: mod_base = OTHER; note = thymine
  modified_base 3002: mod_base = OTHER; note = thymine
  modified_base 3004: mod_base = OTHER; note = thymine
  modified_base 3007: mod_base = OTHER; note = thymine
  modified_base 3017: mod_base = OTHER; note = thymine
  modified_base 3020: mod_base = OTHER; note = thymine
  modified_base 3026: mod_base = OTHER; note = thymine
  modified_base 3032: mod_base = OTHER; note = thymine
  modified_base 3043: mod_base = OTHER; note = thymine
  modified_base 3046..3047: mod_base = OTHER; note = thymine
  modified_base 3050: mod_base = OTHER; note = thymine
  modified_base 3055: mod_base = OTHER; note = thymine
  modified_base 3058..3059: mod_base = OTHER; note = thymine
  modified_base 3061: mod_base = OTHER; note = thymine
  modified_base 3068: mod_base = OTHER; note = thymine
  modified_base 3089: mod_base = OTHER; note = thymine
  modified_base 3091: mod_base = OTHER; note = thymine
  modified_base 3095: mod_base = OTHER; note = thymine
  modified_base 3110: mod_base = OTHER; note = thymine
  modified_base 3118: mod_base = OTHER; note = thymine
  modified_base 3137: mod_base = OTHER; note = thymine
  modified_base 3146: mod_base = OTHER; note = thymine
  modified_base 3152: mod_base = OTHER; note = thymine
  modified_base 3164: mod_base = OTHER; note = thymine
  modified_base 3166: mod_base = OTHER; note = thymine
  modified_base 3169..3170: mod_base = OTHER; note = thymine
  modified_base 3178: mod_base = OTHER; note = thymine
  modified_base 3185: mod_base = OTHER; note = thymine
  modified_base 3194: mod_base = OTHER; note = thymine
  modified_base 3206: mod_base = OTHER; note = thymine
  modified_base 3214: mod_base = OTHER; note = thymine
  modified_base 3221: mod_base = OTHER; note = thymine
  modified_base 3239: mod_base = OTHER; note = thymine
  misc_feature 1..3246: note = Synthetic
  source 1..3246: mol_type = other RNA
atggccgccttcaagcccaaccccatcaactacatcctgggcctggacatcggcatcgcctccgtgggctgggccatggtggagatcgacgaggaggagaaccccatccggctgatcgacctgggcgtgcgggtgttcgagcgggccgaggtgcccaagaccggcgactccctggccatggcccggcggctggcccggtccgtgcggcggctgacccggcggcgggcccaccggctgctgcgggcccggcggctgctgaagcgggagggcgtgctgcaggccgccgacttcgacgagaacggcctgatcaagtccctgcccaacaccccctggcagctgcgggccgccgccctggaccggaagctgacccccctggagtggtccgccgtgctgctgcacctgatcaagcaccggggctacctgtcccagcggaagaacgagggcgagaccgccgacaaggagctgggcgccctgctgaagggcgtggccgacaacgcccacgccctgcagaccggcgacttccggacccccgccgagctggccctgaacaagttcgagaaggagtgcggccacatccggaaccagcggggcgactactcccacaccttctcccggaaggacctgcaggccgagctgaacctgctgttcgagaagcagaaggagttcggcaacccccacgtgtccggcggcctgaaggagggcatcgagaccctgctgatgacccagcggcccgccctgtccggcgacgccgtgcagaagatgctgggccactgcaccttcgagcccgccgagcccaaggccgccaagaacacctacaccgccgagcggttcatctggctgaccaagctgaacaacctgcggatcctggagcagggctccgagcggcccctgaccgacaccgagcgggccaccctgatggacgagccctaccggaagtccaagctgacctacgcccaggcccggaagctgctgtccctggaggacaccgccttcttcaagggcctgcggtacggcaaggacaacgccgaggcctccaccctgatggagatgaaggcctaccacaccatctcccgggccctggagaaggagggcctgaaggacaagaagtcccccctgaacctgtcccccgagctgcaggacgagatcggcaccgccttctccctgttcaagaccgacgaggacatcaccggccggctgaaggaccggatccagcccgagatcctggaggccctgctgaagcacatctccttcgacaagttcgtgcagatctccctgaaggccctgcggcggatcgtgcccctgatggagcagggcaagcggtacgacgaggcctgcgccgagatctacggcgaccactacggcaagaagaacaccgaggagaagatctacctgccccccatccccgccgacgagatccggaaccccgtggtgctgcgggccctgtcccaggcccggaaggtgatcaacggcgtggtgcggcggtacggctcccccgcccggatccacatcgagaccgcccgggaggtgggcaagtccttcaaggaccggaaggagatcgagaagcggcaggaggagaaccggaaggaccgggagaaggccgccgccaagttccgggagtacttccccaacttcgtgggcgagcccaagtccaaggacatcctgaagctgcggctgtacgagcagcagcacggcaagtgcctgtactccggcaaggagatcaacctgggccggctgaacgagaagggctacgtggagatcgacgccgccctgcccttctcccggacctgggacgactccttcaacaacaaggtgctggtgctgggctccgagaaccagaacaagggcaaccagaccccctacgagtacttcaacggcaaggacaactcccgggagtggcaggagttcaaggcccgggtggagacctcccggttcccccggtccaagaagcagcggatcctgctgcagaagttcgacgaggacggcttcaaggagcggaacctgaacgacacccggtacgtgaaccggttcctgtgccagttcgtggccgaccggatgcggctgaccggcaagggcaagaagcgggtgttcgcctccaacggccagatcaccaacctgctgcggggcttctggggcctgcggaaggtgcgggccgagaacgaccggcaccacgccctggacgccgtggtggtggcctgctccaccgtggccatgcagcagaagatcacccggttcgtgcggtacaaggagatgaacgccttcgacggcaagaccatcgacaaggagaccggcgaggtgctgcaccagaagacccacttcccccagccctgggagttcttcgcccaggaggtgatgatccgggtgttcggcaagcccgacggcaagcccgagttcgaggaggccgacacccccgagaagctgcggaccctgctggccgagaagctgtcctcccggcccgaggccgtgcacgagtacgtgacccccctgttcgtgtcccgggcccccaaccggaagatgtccggccagggccacatggagaccgtgaagtccgccaagcggctggacgagggcgtgtccgtgctgcgggtgcccctgacccagctgaagctgaaggacctggagaagatggtgaaccgggagcgggagcccaagctgtacgaggccctgaaggcccggctggaggcccacaaggacgaccccgccaaggccttcgccgagcccttctacaagtacgacaaggccggcaaccggacccagcaggtgaaggccgtgcgggtggagcaggtgcagaagaccggcgtgtgggtgcggaaccacaacggcatcgccgacaacgccaccatggtgcgggtggacgtgttcgagaagggcgacaagtactacctggtgcccatctactcctggcaggtggccaagggcatcctgcccgaccgggccgtggtggcctacgccgacgaggaggactggaccgtgatcgacgagtccttccggttcaagttcgtgctgtactccaacgacctgatcaaggtgcagctgaagaaggactccttcctgggctacttctccggcctggaccgggccaccggcgccatctccctgcgggagcacgacctggagaagtccaagggcaaggacggcatgcaccggatcggcgtgaagaccgccctgtccttccagaagtaccagatcgacgagatgggcaaggagatccggccctgccggctgaagaagcggccccccgtgcggtga

SEQ ID NO: 303 - RNA, 3246 nt, synthetic construct
  modified_base 2: mod_base = OTHER; note = thymine
  modified_base 10..11: mod_base = OTHER; note = thymine
  modified_base 26: mod_base = OTHER; note = thymine
  modified_base 31: mod_base = OTHER; note = thymine
  modified_base 35: mod_base = OTHER; note = thymine
  modified_base 38: mod_base = OTHER; note = thymine
  modified_base 44: mod_base = OTHER; note = thymine
  modified_base 50: mod_base = OTHER; note = thymine
  modified_base 56: mod_base = OTHER; note = thymine
  modified_base 61: mod_base = OTHER; note = thymine
  modified_base 65: mod_base = OTHER; note = thymine
  modified_base 70: mod_base = OTHER; note = thymine
  modified_base 77: mod_base = OTHER; note = thymine
  modified_base 80: mod_base = OTHER; note = thymine
  modified_base 86: mod_base = OTHER; note = thymine
  modified_base 107: mod_base = OTHER; note = thymine
  modified_base 113: mod_base = OTHER; note = thymine
  modified_base 116: mod_base = OTHER; note = thymine
  modified_base 122: mod_base = OTHER; note = thymine
  modified_base 128: mod_base = OTHER; note = thymine
  modified_base 134: mod_base = OTHER; note = thymine
  modified_base 136..137: mod_base = OTHER; note = thymine
  modified_base 152: mod_base = OTHER; note = thymine
  modified_base 169: mod_base = OTHER; note = thymine
  modified_base 173: mod_base = OTHER; note = thymine
  modified_base 179: mod_base = OTHER; note = thymine
  modified_base 191: mod_base = OTHER; note = thymine
  modified_base 199: mod_base = OTHER; note = thymine
  modified_base 203: mod_base = OTHER; note = thymine
  modified_base 212: mod_base = OTHER; note = thymine
  modified_base 236: mod_base = OTHER; note = thymine
  modified_base 239: mod_base = OTHER; note = thymine
  modified_base 254: mod_base = OTHER; note = thymine
  modified_base 257: mod_base = OTHER; note = thymine
  modified_base 272: mod_base = OTHER; note = thymine
  modified_base 275: mod_base = OTHER; note = thymine
  modified_base 289..290: mod_base = OTHER; note = thymine
  modified_base 305: mod_base = OTHER; note = thymine
  modified_base 308: mod_base = OTHER; note = thymine
  modified_base 313: mod_base = OTHER; note = thymine
  modified_base 317: mod_base = OTHER; note = thymine
  modified_base 331: mod_base = OTHER; note = thymine
  modified_base 338: mod_base = OTHER; note = thymine
  modified_base 353: mod_base = OTHER; note = thymine
  modified_base 365: mod_base = OTHER; note = thymine
  modified_base 374: mod_base = OTHER; note = thymine
  modified_base 379: mod_base = OTHER; note = thymine
  modified_base 382: mod_base = OTHER; note = thymine
  modified_base 389: mod_base = OTHER; note = thymine
  modified_base 392: mod_base = OTHER; note = thymine
  modified_base 395: mod_base = OTHER; note = thymine
  modified_base 401: mod_base = OTHER; note = thymine
  modified_base 404: mod_base = OTHER; note = thymine
  modified_base 418: mod_base = OTHER; note = thymine
  modified_base 422: mod_base = OTHER; note = thymine
  modified_base 424: mod_base = OTHER; note = thymine
  modified_base 464: mod_base = OTHER; note = thymine
  modified_base 473: mod_base = OTHER; note = thymine
  modified_base 476: mod_base = OTHER; note = thymine
  modified_base 485: mod_base = OTHER; note = thymine
  modified_base 506: mod_base = OTHER; note = thymine
  modified_base 520..521: mod_base = OTHER; note = thymine
  modified_base 539: mod_base = OTHER; note = thymine
  modified_base 545: mod_base = OTHER; note = thymine
  modified_base 553..554: mod_base = OTHER; note = thymine
  modified_base 565: mod_base = OTHER; note = thymine
  modified_base 575: mod_base = OTHER; note = thymine
  modified_base 595: mod_base = OTHER; note = thymine
  modified_base 598: mod_base = OTHER; note = thymine
  modified_base 607..608: mod_base = OTHER; note = thymine
  modified_base 610: mod_base = OTHER; note = thymine
  modified_base 623: mod_base = OTHER; note = thymine
  modified_base 635: mod_base = OTHER; note = thymine
  modified_base 641: mod_base = OTHER; note = thymine
  modified_base 644: mod_base = OTHER; note = thymine
  modified_base 646..647: mod_base = OTHER; note = thymine
  modified_base 664..665: mod_base = OTHER; note = thymine
  modified_base 680: mod_base = OTHER; note = thymine
  modified_base 682: mod_base = OTHER; note = thymine
  modified_base 692: mod_base = OTHER; note = thymine
  modified_base 704: mod_base = OTHER; note = thymine
  modified_base 713: mod_base = OTHER; note = thymine
  modified_base 716: mod_base = OTHER; note = thymine
  modified_base 719: mod_base = OTHER; note = thymine
  modified_base 737: mod_base = OTHER; note = thymine
  modified_base 739: mod_base = OTHER; note = thymine
  modified_base 752: mod_base = OTHER; note = thymine
  modified_base 761: mod_base = OTHER; note = thymine
  modified_base 764: mod_base = OTHER; note = thymine
  modified_base 772: mod_base = OTHER; note = thymine
  modified_base 778..779: mod_base = OTHER; note = thymine
  modified_base 814: mod_base = OTHER; note = thymine
  modified_base 829..830: mod_base = OTHER; note = thymine
  modified_base 833: mod_base = OTHER; note = thymine
  modified_base 835: mod_base = OTHER; note = thymine
  modified_base 839: mod_base = OTHER; note = thymine
  modified_base 848: mod_base = OTHER; note = thymine
  modified_base 857: mod_base = OTHER; note = thymine
  modified_base 863: mod_base = OTHER; note = thymine
  modified_base 866: mod_base = OTHER; note = thymine
  modified_base 877: mod_base = OTHER; note = thymine
  modified_base 890: mod_base = OTHER; note = thymine
  modified_base 914: mod_base = OTHER; note = thymine
  modified_base 917: mod_base = OTHER; note = thymine
  modified_base 928: mod_base = OTHER; note = thymine
  modified_base 937: mod_base = OTHER; note = thymine
  modified_base 944: mod_base = OTHER; note = thymine
  modified_base 949: mod_base = OTHER; note = thymine
  modified_base 968: mod_base = OTHER; note = thymine
  modified_base 971: mod_base = OTHER; note = thymine
  modified_base 973: mod_base = OTHER; note = thymine
  modified_base 977: mod_base = OTHER; note = thymine
  modified_base 991..992: mod_base = OTHER; note = thymine
  modified_base 994..995: mod_base = OTHER; note = thymine
  modified_base 1004: mod_base = OTHER; note = thymine
  modified_base 1009: mod_base = OTHER; note = thymine
  modified_base 1033: mod_base = OTHER; note = thymine
  modified_base 1040: mod_base = OTHER; note = thymine
  modified_base 1043: mod_base = OTHER; note = thymine
  modified_base 1049: mod_base = OTHER; note = thymine
  modified_base 1057: mod_base = OTHER; note = thymine
  modified_base 1067: mod_base = OTHER; note = thymine
  modified_base 1069: mod_base = OTHER; note = thymine
  modified_base 1079: mod_base = OTHER; note = thymine
  modified_base 1094: mod_base = OTHER; note = thymine
  modified_base 1108: mod_base = OTHER; note = thymine
  modified_base 1115: mod_base = OTHER; note = thymine
  modified_base 1121: mod_base = OTHER; note = thymine
  modified_base 1123: mod_base = OTHER; note = thymine
  modified_base 1133: mod_base = OTHER; note = thymine
  modified_base 1145: mod_base = OTHER; note = thymine
  modified_base 1156..1157: mod_base = OTHER; note = thymine
  modified_base 1159: mod_base = OTHER; note = thymine
  modified_base 1163: mod_base = OTHER; note = thymine
  modified_base 1165..1166: mod_base = OTHER; note = thymine
  modified_base 1184: mod_base = OTHER; note = thymine
  modified_base 1196: mod_base = OTHER; note = thymine
  modified_base 1208: mod_base = OTHER; note = thymine
  modified_base 1220: mod_base = OTHER; note = thymine
  modified_base 1223: mod_base = OTHER; note = thymine
  modified_base 1232: mod_base = OTHER; note = thymine
  modified_base 1235: mod_base = OTHER; note = thymine
  modified_base 1244: mod_base = OTHER; note = thymine
  modified_base 1246: mod_base = OTHER; note = thymine
  modified_base 1249..1250: mod_base = OTHER; note = thymine
  modified_base 1258..1259: mod_base = OTHER; note = thymine
  modified_base 1262: mod_base = OTHER; note = thymine
  modified_base 1268: mod_base = OTHER; note = thymine
  modified_base 1270: mod_base = OTHER; note = thymine
  modified_base 1274: mod_base = OTHER; note = thymine
  modified_base 1283: mod_base = OTHER; note = thymine
  modified_base 1292: mod_base = OTHER; note = thymine
  modified_base 1295: mod_base = OTHER; note = thymine
  modified_base 1301: mod_base = OTHER; note = thymine
  modified_base 1304: mod_base = OTHER; note = thymine
  modified_base 1321: mod_base = OTHER; note = thymine
  modified_base 1333: mod_base = OTHER; note = thymine
  modified_base 1343: mod_base = OTHER; note = thymine
  modified_base 1345: mod_base = OTHER; note = thymine
  modified_base 1357: mod_base = OTHER; note = thymine
  modified_base 1385: mod_base = OTHER; note = thymine
  modified_base 1387: mod_base = OTHER; note = thymine
  modified_base 1391: mod_base = OTHER; note = thymine
  modified_base 1400: mod_base = OTHER; note = thymine
  modified_base 1415: mod_base = OTHER; note = thymine
  modified_base 1427: mod_base = OTHER; note = thymine
  modified_base 1430: mod_base = OTHER; note = thymine
  modified_base 1433: mod_base = OTHER; note = thymine
  modified_base 1442: mod_base = OTHER; note = thymine
  modified_base 1444: mod_base = OTHER; note = thymine
  modified_base 1460: mod_base = OTHER; note = thymine
  modified_base 1463: mod_base = OTHER; note = thymine
  modified_base 1472: mod_base = OTHER; note = thymine
  modified_base 1475: mod_base = OTHER; note = thymine
  modified_base 1483: mod_base = OTHER; note = thymine
  modified_base 1489: mod_base = OTHER; note = thymine
  modified_base 1502: mod_base = OTHER; note = thymine
  modified_base 1508: mod_base = OTHER; note = thymine
  modified_base 1526: mod_base = OTHER; note = thymine
  modified_base 1534: mod_base = OTHER; note = thymine
  modified_base 1537..1538: mod_base = OTHER; note = thymine
  modified_base 1556: mod_base = OTHER; note = thymine
  modified_base 1609..1610: mod_base = OTHER; note = thymine
  modified_base 1618: mod_base = OTHER; note = thymine
  modified_base 1621..1622: mod_base = OTHER; note = thymine
  modified_base 1630..1631: mod_base = OTHER; note = thymine
  modified_base 1634: mod_base = OTHER; note = thymine
  modified_base 1648: mod_base = OTHER; note = thymine
  modified_base 1658: mod_base = OTHER; note = thymine
  modified_base 1661: mod_base = OTHER; note = thymine
  modified_base 1667: mod_base = OTHER; note = thymine
  modified_base 1673: mod_base = OTHER; note = thymine
  modified_base 1675: mod_base = OTHER; note = thymine
  modified_base 1696: mod_base = OTHER; note = thymine
  modified_base 1700: mod_base = OTHER; note = thymine
  modified_base 1702: mod_base = OTHER; note = thymine
  modified_base 1705: mod_base = OTHER; note = thymine
  modified_base 1718: mod_base = OTHER; note = thymine
  modified_base 1724: mod_base = OTHER; note = thymine
  modified_base 1733: mod_base = OTHER; note = thymine
  modified_base 1747: mod_base = OTHER; note = thymine
  modified_base 1751: mod_base = OTHER; note = thymine
  modified_base 1757: mod_base = OTHER; note = thymine
  modified_base 1769: mod_base = OTHER; note = thymine
  modified_base 1774..1775: mod_base = OTHER; note = thymine
  modified_base 1777: mod_base = OTHER; note = thymine
  modified_base 1786: mod_base = OTHER; note = thymine
  modified_base 1795: mod_base = OTHER; note = thymine
  modified_base 1798..1799: mod_base = OTHER; note = thymine
  modified_base 1811: mod_base = OTHER; note = thymine
  modified_base 1814: mod_base = OTHER; note = thymine
  modified_base 1817: mod_base = OTHER; note = thymine
  modified_base 1820: mod_base = OTHER; note = thymine
  modified_base 1825: mod_base = OTHER; note = thymine
  modified_base 1858: mod_base = OTHER; note = thymine
  modified_base 1864: mod_base = OTHER; note = thymine
  modified_base 1867..1868: mod_base = OTHER; note = thymine
  modified_base 1885: mod_base = OTHER; note = thymine
  modified_base 1894: mod_base = OTHER; note = thymine
  modified_base 1903..1904: mod_base = OTHER; note = thymine
  modified_base 1916: mod_base = OTHER; note = thymine
  modified_base 1924: mod_base = OTHER; note = thymine
  modified_base 1930..1931: mod_base = OTHER; note = thymine
  modified_base 1939: mod_base = OTHER; note = thymine
  modified_base 1955: mod_base = OTHER; note = thymine
  modified_base 1958: mod_base = OTHER; note = thymine
  modified_base 1961: mod_base = OTHER; note = thymine
  modified_base 1969..1970: mod_base = OTHER; note = thymine
  modified_base 1984..1985: mod_base = OTHER; note = thymine
  modified_base 2000: mod_base = OTHER; note = thymine
  modified_base 2014: mod_base = OTHER; note = thymine
  modified_base 2018: mod_base = OTHER; note = thymine
  modified_base 2026..2027: mod_base = OTHER; note = thymine
  modified_base 2030: mod_base = OTHER; note = thymine
  modified_base 2032: mod_base = OTHER; note = thymine
  modified_base 2038..2039: mod_base = OTHER; note = thymine
  modified_base 2042: mod_base = OTHER; note = thymine
  modified_base 2054: mod_base = OTHER; note = thymine
  modified_base 2060: mod_base = OTHER; note = thymine
  modified_base 2084: mod_base = OTHER; note = thymine
  modified_base 2086..2087: mod_base = OTHER; note = thymine
  modified_base 2092: mod_base = OTHER; note = thymine
  modified_base 2105: mod_base = OTHER; note = thymine
  modified_base 2114: mod_base = OTHER; note = thymine
  modified_base 2117: mod_base = OTHER; note = thymine
  modified_base 2125..2126: mod_base = OTHER; note = thymine
  modified_base 2128: mod_base = OTHER; note = thymine
  modified_base 2135: mod_base = OTHER; note = thymine
  modified_base 2144: mod_base = OTHER; note = thymine
  modified_base 2174: mod_base = OTHER; note = thymine
  modified_base 2183: mod_base = OTHER; note = thymine
  modified_base 2186: mod_base = OTHER; note = thymine
  modified_base 2189: mod_base = OTHER; note = thymine
  modified_base 2194: mod_base = OTHER; note = thymine
  modified_base 2197: mod_base = OTHER; note = thymine
  modified_base 2204: mod_base = OTHER; note = thymine
  modified_base 2210: mod_base = OTHER; note = thymine
  modified_base 2222: mod_base = OTHER; note = thymine
  modified_base 2230..2231: mod_base = OTHER; note = thymine
  modified_base 2234: mod_base = OTHER; note = thymine
  modified_base 2239: mod_base = OTHER; note = thymine
  modified_base 2249: mod_base = OTHER; note = thymine
  modified_base 2257..2258: mod_base = OTHER; note = thymine
  modified_base 2273: mod_base = OTHER; note = thymine
  modified_base 2294: mod_base = OTHER; note = thymine
  modified_base 2297: mod_base = OTHER; note = thymine
  modified_base 2314..2315: mod_base = OTHER; note = thymine
  modified_base 2326: mod_base = OTHER; note = thymine
  modified_base 2332..2333: mod_base = OTHER; note = thymine
  modified_base 2335..2336: mod_base = OTHER; note = thymine
  modified_base 2348: mod_base = OTHER; note = thymine
  modified_base 2351: mod_base = OTHER; note = thymine
  modified_base 2354: mod_base = OTHER; note = thymine
  modified_base 2360: mod_base = OTHER; note = thymine
  modified_base 2362..2363: mod_base = OTHER; note = thymine
  modified_base 2389..2390: mod_base = OTHER; note = thymine
  modified_base 2417: mod_base = OTHER; note = thymine
  modified_base 2426: mod_base = OTHER; note = thymine
  modified_base 2429: mod_base = OTHER; note = thymine
  modified_base 2441: mod_base = OTHER; note = thymine
  modified_base 2443: mod_base = OTHER; note = thymine
  modified_base 2446: mod_base = OTHER; note = thymine
  modified_base 2462: mod_base = OTHER; note = thymine
  modified_base 2470: mod_base = OTHER; note = thymine
  modified_base 2474: mod_base = OTHER; note = thymine
  modified_base 2483: mod_base = OTHER; note = thymine
  modified_base 2485..2486: mod_base = OTHER; note = thymine
  modified_base 2489: mod_base = OTHER; note = thymine
  modified_base 2491: mod_base = OTHER; note = thymine
  modified_base 2513: mod_base = OTHER; note = thymine
  modified_base 2515: mod_base = OTHER; note = thymine
  modified_base 2531: mod_base = OTHER; note = thymine
  modified_base 2540: mod_base = OTHER; note = thymine
  modified_base 2545: mod_base = OTHER; note = thymine
  modified_base 2558: mod_base = OTHER; note = thymine
  modified_base 2570: mod_base = OTHER; note = thymine
  modified_base 2572: mod_base = OTHER; note = thymine
  modified_base 2576: mod_base = OTHER; note = thymine
  modified_base 2579: mod_base = OTHER; note = thymine
  modified_base 2585: mod_base = OTHER; note = thymine
  modified_base 2591: mod_base = OTHER; note = thymine
  modified_base 2600: mod_base = OTHER; note = thymine
  modified_base 2606: mod_base = OTHER; note = thymine
  modified_base 2615: mod_base = OTHER; note = thymine
  modified_base 2624: mod_base = OTHER; note = thymine
  modified_base 2627: mod_base = OTHER; note = thymine
  modified_base 2651: mod_base = OTHER; note = thymine
  modified_base 2653: mod_base = OTHER; note = thymine
  modified_base 2663: mod_base = OTHER; note = thymine
  modified_base 2675: mod_base = OTHER; note = thymine
  modified_base 2707..2708: mod_base = OTHER; note = thymine
  modified_base 2719..2720: mod_base = OTHER; note = thymine
  modified_base 2722: mod_base = OTHER; note = thymine
  modified_base 2728: mod_base = OTHER; note = thymine
  modified_base 2759: mod_base = OTHER; note = thymine
  modified_base 2768: mod_base = OTHER; note = thymine
  modified_base 2774: mod_base = OTHER; note = thymine
  modified_base 2783: mod_base = OTHER; note = thymine
  modified_base 2798: mod_base = OTHER; note = thymine
  modified_base 2800: mod_base = OTHER; note = thymine
  modified_base 2804: mod_base = OTHER; note = thymine
  modified_base 2822: mod_base = OTHER; note = thymine
  modified_base 2840: mod_base = OTHER; note = thymine
  modified_base 2843: mod_base = OTHER; note = thymine
  modified_base 2849: mod_base = OTHER; note = thymine
  modified_base 2855: mod_base = OTHER; note = thymine
  modified_base 2857..2858: mod_base = OTHER; note = thymine
  modified_base 2875: mod_base = OTHER; note = thymine
  modified_base 2878: mod_base = OTHER; note = thymine
  modified_base 2882: mod_base = OTHER; note = thymine
  modified_base 2885: mod_base = OTHER; note = thymine
  modified_base 2891: mod_base = OTHER; note = thymine
  modified_base 2893: mod_base = OTHER; note = thymine
  modified_base 2896: mod_base = OTHER; note = thymine
  modified_base 2899: mod_base = OTHER; note = thymine
  modified_base 2906: mod_base = OTHER; note = thymine
  modified_base 2918: mod_base = OTHER; note = thymine
  modified_base 2921: mod_base = OTHER; note = thymine
  modified_base 2936: mod_base = OTHER; note = thymine
  modified_base 2939: mod_base = OTHER; note = thymine
  modified_base 2944: mod_base = OTHER; note = thymine
  modified_base 2962: mod_base = OTHER; note = thymine
  modified_base 2969: mod_base = OTHER; note = thymine
  modified_base 2972: mod_base = OTHER; note = thymine
  modified_base 2980: mod_base = OTHER; note = thymine
  modified_base 2983..2984: mod_base = OTHER; note = thymine
  modified_base 2989..2990: mod_base = OTHER; note = thymine
  modified_base 2995..2996: mod_base = OTHER; note = thymine
  modified_base 2999: mod_base = OTHER; note = thymine
  modified_base 3002: mod_base = OTHER; note = thymine
  modified_base 3004: mod_base = OTHER; note = thymine
  modified_base 3007: mod_base = OTHER; note = thymine
  modified_base 3017: mod_base = OTHER; note = thymine
  modified_base 3020: mod_base = OTHER; note = thymine
  modified_base 3026: mod_base = OTHER; note = thymine
  modified_base 3032: mod_base = OTHER; note = thymine
  modified_base 3043: mod_base = OTHER; note = thymine
  modified_base 3046..3047: mod_base = OTHER; note = thymine
  modified_base 3050: mod_base = OTHER; note = thymine
  modified_base 3055: mod_base = OTHER; note = thymine
  modified_base 3058..3059: mod_base = OTHER; note = thymine
  modified_base 3061: mod_base = OTHER; note = thymine
  modified_base 3068: mod_base = OTHER; note = thymine
  modified_base 3089: mod_base = OTHER; note = thymine
  modified_base 3091: mod_base = OTHER; note = thymine
  modified_base 3095: mod_base = OTHER; note = thymine
  modified_base 3110: mod_base = OTHER; note = thymine
  modified_base 3118: mod_base = OTHER; note = thymine
  modified_base 3137: mod_base = OTHER; note = thymine
  modified_base 3146: mod_base = OTHER; note = thymine
  modified_base 3152: mod_base = OTHER; note = thymine
  modified_base 3164: mod_base = OTHER; note = thymine
  modified_base 3166: mod_base = OTHER; note = thymine
  modified_base 3169..3170: mod_base = OTHER; note = thymine
  modified_base 3178: mod_base = OTHER; note = thymine
  modified_base 3185: mod_base = OTHER; note = thymine
  modified_base 3194: mod_base = OTHER; note = thymine
  modified_base 3206: mod_base = OTHER; note = thymine
  modified_base 3214: mod_base = OTHER; note = thymine
  modified_base 3221: mod_base = OTHER; note = thymine
  modified_base 3239: mod_base = OTHER; note = thymine
  misc_feature 1..3246: note = Synthetic
  source 1..3246: mol_type = other RNA
atggcagcattcaaaccaaacccaatcaactacatcctaggactagacatcggaatcgcatcagtaggatgagcaatggtagaaatcgacgaagaagaaaacccaatccgactaatcgacctaggagtacgagtattcgaacgagcagaagtaccaaaaacaggagactcactagcaatggcacgacgactagcacgatcagtacgacgactaacacgacgacgagcacaccgactactacgagcacgacgactactaaaacgagaaggagtactacaagcagcagacttcgacgaaaacggactaatcaaatcactaccaaacacaccatgacaactacgagcagcagcactagaccgaaaactaacaccactagaatgatcagcagtactactacacctaatcaaacaccgaggatacctatcacaacgaaaaaacgaaggagaaacagcagacaaagaactaggagcactactaaaaggagtagcagacaacgcacacgcactacaaacaggagacttccgaacaccagcagaactagcactaaacaaattcgaaaaagaatgcggacacatccgaaaccaacgaggagactactcacacacattctcacgaaaagacctacaagcagaactaaacctactattcgaaaaacaaaaagaattcggaaacccacacgtatcaggaggactaaaagaaggaatcgaaacactactaatgacacaacgaccagcactatcaggagacgcagtacaaaaaatgctaggacactgcacattcgaaccagcagaaccaaaagcagcaaaaaacacatacacagcagaacgattcatctgactaacaaaactaaacaacctacgaatcctagaacaaggatcagaacgaccactaacagacacagaacgagcaacactaatggacgaaccataccgaaaatcaaaactaacatacgcacaagcacgaaaactactatcactagaagacacagcattcttcaaaggactacgatacggaaaagacaacgcagaagcatcaacactaatggaaatgaaagcataccacacaatctcacgagcactagaaaaagaaggactaaaagacaaaaaatcaccactaaacctatcaccagaactacaagacgaaatcggaacagcattctcactattcaaaacagacgaagacatcacaggacgactaaaagaccgaatccaaccagaaatcctagaagcactactaaaacacatctcattcgacaaattcgtacaaatctcactaaaagcactacgacgaatcgtaccactaatggaacaaggaaaacgatacgacgaagcatgcgcagaaatctacggagaccactacggaaaaaaaaacacagaagaaaaaatctacctaccaccaatcccagcagacgaaatccgaaacccagtagtactacgagcactatcacaagcacgaaaagtaatcaacggagtagtacgacgatacggatcaccagcacgaatccacatcgaaacagcacgagaagtaggaaaatcattcaaagaccgaaaagaaatcgaaaaacgacaagaagaaaaccgaaaagaccgagaaaaagcagcagcaaaattccgagaatacttcccaaacttcgtaggagaaccaaaatcaaaagacatcctaaaactacgactatacgaacaacaacacggaaaatgcctatactcaggaaaagaaatcaacctaggacgactaaacgaaaaaggatacgtagaaatcgacgcagcactaccattctcacgaacatgagacgactcattcaacaacaaagtactagtactaggatcagaaaaccaaaacaaaggaaaccaaacaccatacgaatacttcaacggaaaagacaactcacgagaatgacaagaattcaaagcacgagtagaaacatcacgattcccacgatcaaaaaaacaacgaatcctactacaaaaattcgacgaagacggattcaaagaacgaaacctaaacgacacacgatacgtaaaccgattcctatgccaattcgtagcagaccgaatgcgactaacaggaaaaggaaaaaaacgagtattcgcatcaaacggacaaatcacaaacctactacgaggattctgaggactacgaaaagtacgagcagaaaacgaccgacaccacgcactagacgcagtagtagtagcatgctcaacagtagcaatgcaacaaaaaatcacacgattcgtacgatacaaagaaatgaacgcattcgacggaaaaacaatcgacaaagaaacaggagaagtactacaccaaaaaacacacttcccacaaccatgagaattcttcgcacaagaagtaatgatccgagtattcggaaaaccagacggaaaaccagaattcgaagaagcagacacaccagaaaaactacgaacactactagcagaaaaactatcatcacgaccagaagcagtacacgaatacgtaacaccactattcgtatcacgagcaccaaaccgaaaaatgtcaggacaaggacacatggaaacagtaaaatcagcaaaacgactagacgaaggagtatcagtactacgagtaccactaacacaactaaaactaaaagacctagaaaaaatggtaaaccgagaacgagaaccaaaactatacgaagcactaaaagcacgactagaagcacacaaagacgacccagcaaaagcattcgcagaaccattctacaaatacgacaaagcaggaaaccgaacacaacaagtaaaagcagtacgagtagaacaagtacaaaaaacaggagtatgagtacgaaaccacaacggaatcgcagacaacgcaacaatggtacgagtagacgtattcgaaaaaggagacaaatactacctagtaccaatctactcatgacaagtagcaaaaggaatcctaccagaccgagcagtagtagcatacgcagacgaagaagactgaacagtaatcgacgaatcattccgattcaaattcgtactatactcaaacgacctaatcaaagtacaactaaaaaaagactcattcctaggatacttctcaggactagaccgagcaacaggagcaatctcactacgagaacacgacctagaaaaatcaaaaggaaaagacggaatgcaccgaatcggagtaaaaacagcactatcattccaaaaataccaaatcgacgaaatgggaaaagaaatccgaccatgccgactaaaaaaacgaccaccagtacgataa

SEQ ID NO: 304 - RNA, 3793 nt, synthetic construct
  misc_feature 1..3793: note = Synthetic
  source 1..3793: mol_type = other RNA
gggaagctcagaataaacgctcaactttggccggatctgccaccatggacggctccggcggcggctcccccaagaagaagcggaaggtggaggacaagcggcccgccgccaccaagaaggccggccaggccaagaagaagaagggcggctccggcggcggcgccgccttcaagcccaaccccatcaactacatcctgggcctggacatcggcatcgcctccgtgggctgggccatggtggagatcgacgaggaggagaaccccatccggctgatcgacctgggcgtgcgggtgttcgagcgggccgaggtgcccaagaccggcgactccctggccatggcccggcggctggcccggtccgtgcggcggctgacccggcggcgggcccaccggctgctgcgggcccggcggctgctgaagcgggagggcgtgctgcaggccgccgacttcgacgagaacggcctgatcaagtccctgcccaacaccccctggcagctgcgggccgccgccctggaccggaagctgacccccctggagtggtccgccgtgctgctgcacctgatcaagcaccggggctacctgtcccagcggaagaacgagggcgagaccgccgacaaggagctgggcgccctgctgaagggcgtggccaacaacgcccacgccctgcagaccggcgacttccggacccccgccgagctggccctgaacaagttcgagaaggagtccggccacatccggaaccagcggggcgactactcccacaccttctcccggaaggacctgcaggccgagctgatcctgctgttcgagaagcagaaggagttcggcaacccccacgtgtccggcggcctgaaggagggcatcgagaccctgctgatgacccagcggcccgccctgtccggcgacgccgtgcagaagatgctgggccactgcaccttcgagcccgccgagcccaaggccgccaagaacacctacaccgccgagcggttcatctggctgaccaagctgaacaacctgcggatcctggagcagggctccgagcggcccctgaccgacaccgagcgggccaccctgatggacgagccctaccggaagtccaagctgacctacgcccaggcccggaagctgctgggcctggaggacaccgccttcttcaagggcctgcggtacggcaaggacaacgccgaggcctccaccctgatggagatgaaggcctaccacgccatctcccgggccctggagaaggagggcctgaaggacaagaagtcccccctgaacctgtcctccgagctgcaggacgagatcggcaccgccttctccctgttcaagaccgacgaggacatcaccggccggctgaaggaccgggtgcagcccgagatcctggaggccctgctgaagcacatctccttcgacaagttcgtgcagatctccctgaaggccctgcggcggatcgtgcccctgatggagcagggcaagcggtacgacgaggcctgcgccgagatctacggcgaccactacggcaagaagaacaccgaggagaagatctacctgccccccatccccgccgacgagatccggaaccccgtggtgctgcgggccctgtcccaggcccggaaggtgatcaacggcgtggtgcggcggtacggctcccccgcccggatccacatcgagaccgcccgggaggtgggcaagtccttcaaggaccggaaggagatcgagaagcggcaggaggagaaccggaaggaccgggagaaggccgccgccaagttccgggagtacttccccaacttcgtgggcgagcccaagtccaaggacatcctgaagctgcggctgtacgagcagcagcacggcaagtgcctgtactccggcaaggagatcaacctggtgcggctgaacgagaagggctacgtggagatcgaccacgccctgcccttctcccggacctgggacgactccttcaacaacaaggtgctggtgctgggctccgagaaccagaacaagggcaaccagaccccctacgagtacttcaacggcaaggacaactcccgggagtggcaggagttcaaggcccgggtggagacctcccggttcccccggtccaagaagcagcggatcctgctgcagaagttcgacgaggacggcttcaaggagtgcaacctgaacgacacccggtacgtgaaccggttcctgtgccagttcgtggccgaccacatcctgctgaccggcaagggcaagcggcgggtgttcgcctccaacggccagatcaccaacctgctgcggggcttctggggcctgcggaaggtgcgggccgagaacgaccggcaccacgccctggacgccgtggtggtggcctgctccaccgtggccatgcagcagaagatcacccggttcgtgcggtacaaggagatgaacgccttcgacggcaagaccatcgacaaggagaccggcaaggtgctgcaccagaagacccacttcccccagccctgggagttcttcgcccaggaggtgatgatccgggtgttcggcaagcccgacggcaagcccgagttcgaggaggccgacacccccgagaagctgcggaccctgctggccgagaagctgtcctcccggcccgaggccgtgcacgagtacgtgacccccctgttcgtgtcccgggcccccaaccggaagatgtccggcgcccacaaggacaccctgcggtccgccaagcggttcgtgaagcacaacgagaagatctccgtgaagcgggtgtggctgaccgagatcaagctggccgacctggagaacatggtgaactacaagaacggccgggagatcgagctgtacgaggccctgaaggcccggctggaggcctacggcggcaacgccaagcaggccttcgaccccaaggacaaccccttctacaagaagggcggccagctggtgaaggccgtgcgggtggagaagacccaggagtccggcgtgctgctgaacaagaagaacgcctacaccatcgccgacaacggcgacatggtgcgggtggacgtgttctgcaaggtggacaagaagggcaagaaccagtacttcatcgtgcccatctacgcctggcaggtggccgagaacatcctgcccgacatcgactgcaagggctaccggatcgacgactcctacaccttctgcttctccctgcacaagtacgacctgatcgccttccagaaggacgagaagtccaaggtggagttcgcctactacatcaactgcgactcctccaacggccggttctacctggcctggcacgacaagggctccaaggagcagcagttccggatctccacccagaacctggtgctgatccagaagtaccaggtgaacgagctgggcaaggagatccggccctgccggctgaagaagcggccccccgtgcggtagctagcaccagcctcaagaacacccgaatggagtctctaagctacataataccaacttacactttacaaaatgttgtcccccaaaatgtagccattcgtatctgctcctaataaaaagaaagtttcttcacattctcaaaaaaaaaaaaaaaaaaaaaaaaaaaaaaaaaaaaaaaaaaaaaaaaaaaaaaaaaaaaaaaaaaaaaaaaaaaaaaaaaaaaaaaaaaaaaaaaaaaaaaaaaaaaaaaaaaaaaaaaaaaaaaaaaaaaaaaaaaaaaaaaaaaaaaaaaaaaaaaaaaaaaaaaaaaaaaaaaaaaaaaaaaaaaaaaaaaaaaaaaaaaaaaaaaaaaaaaaaaaaaaaaaaaaaaaaaaaaaaaaaaaaaaaaa

SEQ ID NO: 305 - RNA, 3684 nt, synthetic construct
  misc_feature 1..3684: note = Synthetic
  source 1..3684: mol_type = other RNA
gggtcccgcagtcggcgtccagcggctctgcttgttcgtgtgtgtgtcgttgcaggccttattcggatccgccaccatggcagcattcaagccgaactcgatcaactacatcctgggactggacatcggaatcgcatcggtcggatgggcaatggtcgaaatcgacgaagaagaaaacccgatcagactgatcgacctgggagtcagagtcttcgaaagagcagaagtcccgaagacaggagactcgctggcaatggcaagaagactggcaagatcggtcagaagactgacaagaagaagagcacacagactgctgagaacaagaagactgctgaagagagaaggagtcctgcaggcagcaaacttcgacgaaaacggactgatcaagtcgctgccgaacacaccgtggcagctgagagcagcagcactggacagaaagctgacaccgctggaatggtcggcagtcctgctgcacctgatcaagcacagaggatacctgtcgcagagaaagaacgaaggagaaacagcagacaaggaactgggagcactgctgaagggagtcgcaggaaacgcacacgcactgcagacaggagacttcagaacaccggcagaactggcactgaacaagttcgaaaaggaatcgggacacatcagaaaccagagatcggactactcgcacacattctcgagaaaggacctgcaggcagaactgatcctgctgttcgaaaagcagaaggaattcggaaacccgcacgtctcgggaggactgaaggaaggaatcgaaacactgctgatgacacagagaccggcactgtcgggagacgcagtccagaagatgctgggacactgcacattcgaaccggcagaaccgaaggcagcaaagaacacatacacagcagaaagattcatctggctgacaaagctgaacaacctgagaatcctggaacagggatcggaaagaccgctgacagacacagaaagagcaacactgatggacgaaccgtacagaaagtcgaagctgacatacgcacaggcaagaaagctgctgggactggaagacacagcattcttcaagggactgagatacggaaaggacaacgcagaagcatcgacactgatggaaatgaaggcataccacgcaatctcgagagcactggaaaaggaaggactgaaggacaagaagtcgccgctgaacctgtcgccggaactgcaggacgaaatcggaacagcattctcgctgttcaagacagacgaagacatcacaggaagactgaaggacagaatccagccggaaatcctggaagcactgctgaagcacatctcgttcgacaagttcgtccagatctcgctgaaggcactgagaagaatcgtcccgctgatggaacagggaaagagatacgacgaagcatgcgcagaaatctacggagaccactacggaaagaagaacacagaagaaaagatctacctgccgccgatcccggcagacgaaatcagaaacccggtcgtcctgagagcactgtcgcaggcaagaaaggtcatcaacggagtcgtcagaagatacggatcgccggcaagaatccacatcgaaacagcaagagaagtcggaaagtcgttcaaggacagaaaggaaatcgaaaagagacaggaagaaaacagaaaggacagagaaaaggcagcagcaaagttcagagaatacttcccgaacttcgtcggagaaccgaagtcgaaggacatcctgaagctgagactgtacgaacagcagcacggaaagtgcctgtactcgggaaaggaaatcaacctgggaagactgaacgaaaagggatacgtcgaaatcgaccacgcactgccgttctcgagaacatgggacgactcgttcaacaacaaggtcctggtcctgggatcggaaaaccagaacaagggaaaccagacaccgtacgaatacttcaacggaaaggacaactcgagagaatggcaggaattcaaggcaagagtcgaaacatcgagattcccgagatcgaagaagcagagaatcctgctgcagaagttcgacgaagacggattcaaggaaagaaacctgaacgacacaagatacgtcaacagattcctgtgccagttcgtcgcagacagaatgagactgacaggaaagggaaagaagagagtcttcgcatcgaacggacagatcacaaacctgctgagaggattctggggactgagaaaggtcagagcagaaaacgacagacaccacgcactggacgcagtcgtcgtcgcatgctcgacagtcgcaatgcagcagaagatcacaagattcgtcagatacaaggaaatgaacgcattcgacggaaagacaatcgacaaggaaacaggagaagtcctgcaccagaagacacacttcccgcagccgtgggaattcttcgcacaggaagtcatgatcagagtcttcggaaagccggacggaaagccggaattcgaagaagcagacacactggaaaagctgagaacactgctggcagaaaagctgtcgtcgagaccggaagcagtccacgaatacgtcacaccgctgttcgtctcgagagcaccgaacagaaagatgtcgggacagggacacatggaaacagtcaagtcggcaaagagactggacgaaggagtctcggtcctgagagtcccgctgacacagctgaagctgaaggacctggaaaagatggtcaacagagaaagagaaccgaagctgtacgaagcactgaaggcaagactggaagcacacaaggacgacccggcaaaggcattcgcagaaccgttctacaagtacgacaaggcaggaaacagaacacagcaggtcaaggcagtcagagtcgaacaggtccagaagacaggagtctgggtcagaaaccacaacggaatcgcagacaacgcaacaatggtcagagtagacgtcttcgaaaagggagacaagtactacctggtcccgatctactcgtggcaggtcgcaaagggaatcctgccggacagagcagtcgtccagggaaaggacgaagaagactggcagctgatcgacgactcgttcaacttcaagttctcgctgcacccgaacgacctggtcgaagtcatcacaaagaaggcaagaatgttcggatacttcgcatcgtgccacagaggaacaggaaacatcaacatcagaatccacgacctggaccacaagatcggaaagaacggaatcctggaaggaatcggagtcaagacagcactgtcgttccagaagtaccagatcgacgaactgggaaaggaaatcagaccgtgcagactgaagaagagaccgccggtcagatccggaaagagaacagcagacggatcggaattcgaatcgccgaagaagaagagaaaggtcgaatgatagctagccatcacatttaaaagcatctcagcctaccatgagaataagagaaagaaaatgaagatcaatagcttattcatctctttttctttttcgttggtgtaaagccaacaccctgtctaaaaaacataaatttctttaatcattttgcctcttttctctgtgcttcaattaataaaaaatggaaagaacctcgagaaaaaaaaaaaaaaaaaaaaaaaaaaaaaaaaaaaaaaaaaaaaaaaaaaaaaaaaaaaaaaaaaaaaaaaaaaaaaaaaaaaaaaaaaaaaatctag

SEQ ID NO: 306 - RNA, 3975 nt, synthetic construct
  misc_feature 1..3975: note = Synthetic
  source 1..3975: mol_type = other RNA
gggaagctcagaataaacgctcaactttggccggatctgccaccatggacggctccggcggcggctcccccaagaagaagcggaaggtggaggacaagcggcccgccgccaccaagaaggccggccaggccaagaagaagaagggcggctccggcggcggcgccgccttcaagcccaaccccatcaactacatcctgggcctggacatcggcatcgcctccgtgggctgggccatggtggagatcgacgaggaggagaaccccatccggctgatcgacctgggcgtgcgggtgttcgagcgggccgaggtgcccaagaccggcgactccctggccatggcccggcggctggcccggtccgtgcggcggctgacccggcggcgggcccaccggctgctgcgggcccggcggctgctgaagcgggagggcgtgctgcaggccgccgacttcgacgagaacggcctgatcaagtccctgcccaacaccccctggcagctgcgggccgccgccctggaccggaagctgacccccctggagtggtccgccgtgctgctgcacctgatcaagcaccggggctacctgtcccagcggaagaacgagggcgagaccgccgacaaggagctgggcgccctgctgaagggcgtggccaacaacgcccacgccctgcagaccggcgacttccggacccccgccgagctggccctgaacaagttcgagaaggagtccggccacatccggaaccagcggggcgactactcccacaccttctcccggaaggacctgcaggccgagctgatcctgctgttcgagaagcagaaggagttcggcaacccccacgtgtccggcggcctgaaggagggcatcgagaccctgctgatgacccagcggcccgccctgtccggcgacgccgtgcagaagatgctgggccactgcaccttcgagcccgccgagcccaaggccgccaagaacacctacaccgccgagcggttcatctggctgaccaagctgaacaacctgcggatcctggagcagggctccgagcggcccctgaccgacaccgagcgggccaccctgatggacgagccctaccggaagtccaagctgacctacgcccaggcccggaagctgctgggcctggaggacaccgccttcttcaagggcctgcggtacggcaaggacaacgccgaggcctccaccctgatggagatgaaggcctaccacgccatctcccgggccctggagaaggagggcctgaaggacaagaagtcccccctgaacctgtcctccgagctgcaggacgagatcggcaccgccttctccctgttcaagaccgacgaggacatcaccggccggctgaaggaccgggtgcagcccgagatcctggaggccctgctgaagcacatctccttcgacaagttcgtgcagatctccctgaaggccctgcggcggatcgtgcccctgatggagcagggcaagcggtacgacgaggcctgcgccgagatctacggcgaccactacggcaagaagaacaccgaggagaagatctacctgccccccatccccgccgacgagatccggaaccccgtggtgctgcgggccctgtcccaggcccggaaggtgatcaacggcgtggtgcggcggtacggctcccccgcccggatccacatcgagaccgcccgggaggtgggcaagtccttcaaggaccggaaggagatcgagaagcggcaggaggagaaccggaaggaccgggagaaggccgccgccaagttccgggagtacttccccaacttcgtgggcgagcccaagtccaaggacatcctgaagctgcggctgtacgagcagcagcacggcaagtgcctgtactccggcaaggagatcaacctggtgcggctgaacgagaagggctacgtggagatcgaccacgccctgcccttctcccggacctgggacgactccttcaacaacaaggtgctggtgctgggctccgagaaccagaacaagggcaaccagaccccctacgagtacttcaacggcaaggacaactcccgggagtggcaggagttcaaggcccgggtggagacctcccggttcccccggtccaagaagcagcggatcctgctgcagaagttcgacgaggacggcttcaaggagtgcaacctgaacgacacccggtacgtgaaccggttcctgtgccagttcgtggccgaccacatcctgctgaccggcaagggcaagcggcgggtgttcgcctccaacggccagatcaccaacctgctgcggggcttctggggcctgcggaaggtgcgggccgagaacgaccggcaccacgccctggacgccgtggtggtggcctgctccaccgtggccatgcagcagaagatcacccggttcgtgcggtacaaggagatgaacgccttcgacggcaagaccatcgacaaggagaccggcaaggtgctgcaccagaagacccacttcccccagccctgggagttcttcgcccaggaggtgatgatccgggtgttcggcaagcccgacggcaagcccgagttcgaggaggccgacacccccgagaagctgcggaccctgctggccgagaagctgtcctcccggcccgaggccgtgcacgagtacgtgacccccctgttcgtgtcccgggcccccaaccggaagatgtccggcgcccacaaggacaccctgcggtccgccaagcggttcgtgaagcacaacgagaagatctccgtgaagcgggtgtggctgaccgagatcaagctggccgacctggagaacatggtgaactacaagaacggccgggagatcgagctgtacgaggccctgaaggcccggctggaggcctacggcggcaacgccaagcaggccttcgaccccaaggacaaccccttctacaagaagggcggccagctggtgaaggccgtgcgggtggagaagacccaggagtccggcgtgctgctgaacaagaagaacgcctacaccatcgccgacaacggcgacatggtgcgggtggacgtgttctgcaaggtggacaagaagggcaagaaccagtacttcatcgtgcccatctacgcctggcaggtggccgagaacatcctgcccgacatcgactgcaagggctaccggatcgacgactcctacaccttctgcttctccctgcacaagtacgacctgatcgccttccagaaggacgagaagtccaaggtggagttcgcctactacatcaactgcgactcctccaacggccggttctacctggcctggcacgacaagggctccaaggagcagcagttccggatctccacccagaacctggtgctgatccagaagtaccaggtgaacgagctgggcaaggagatccggccctgccggctgaagaagcggccccccgtgcggtccgagtccgccacccccgagtccgtgtccggctggcggctgttcaagaagatctcctagctagcaccagcctcaagaacacccgaatggagtctctaagctacataataccaacttacactttacaaaatgttgtcccccaaaatgtagccattcgtatctgctcctaataaaaagaaagtttcttcacattctaaaaaaaaaaaatggaaaaaaaaaaaacggaaaaaaaaaaaaggtaaaaaaaaaaaatataaaaaaaaaaaacataaaaaaaaaaaacgaaaaaaaaaaaacgtaaaaaaaaaaaactcaaaaaaaaaaaagataaaaaaaaaaaacctaaaaaaaaaaaatgtaaaaaaaaaaaagggaaaaaaaaaaaacgcaaaaaaaaaaaacacaaaaaaaaaaaatgcaaaaaaaaaaaatcgaaaaaaaaaaaatctaaaaaaaaaaaacgaaaaaaaaaaaacccaaaaaaaaaaaagacaaaaaaaaaaaatagaaaaaaaaaaaagttaaaaaaaaaaaactgaaaaaaaaaaaatttaaaaaaaaaaaatctcga

SEQ ID NO: 307 - RNA, 3975 nt, synthetic construct
  misc_feature 1..3975: note = Synthetic
  source 1..3975: mol_type = other RNA
gggaagctcagaataaacgctcaactttggccggatctgccaccatggacggctccggcggcggctcccccaagaagaagcggaaggtggaggacaagcggcccgccgccaccaagaaggccggccaggccaagaagaagaagggcggctccggcggcggcgcagcattcaagccaaactcaatcaattacatcctgggactggacatcggcatcgcatccgtcgggtgggctatggtcgaaatcgacgaggaggagaaccccatccgcctgatcgatctgggcgtgcgcgtgtttgagagggcagaggtgcctaagaccggcgacagcctggccatggcacggagactggcacgctccgtgaggcgcctgacccggagaagggcccacagactgctgaggacacgccggctgctgaagagggagggcgtgctgcaggccgccaacttcgatgagaatggcctgatcaagtccctgcccaataccccttggcagctgagggcagccgccctggaccgcaagctgacacctctggagtggtccgccgtgctgctgcacctgatcaagcaccggggctacctgtctcagagaaagaacgagggcgagacagccgataaggagctgggcgccctgctgaagggagtggcaggaaatgcacacgccctgcagaccggcgactttcgcacaccagccgagctggccctgaacaagttcgagaaggagagcggccacatccgcaatcagcggtctgactatagccacaccttctcccggaaggatctgcaggccgagctgatcctgctgtttgagaagcagaaggagttcggcaacccacacgtgtctggcggcctgaaggagggcatcgagacactgctgatgacacagcggcccgccctgagcggcgacgcagtgcagaagatgctgggacactgcacctttgagccagccgagcccaaggccgccaagaatacctacacagccgagcggttcatctggctgacaaagctgaacaatctgaggatcctggagcagggaagcgagcgcccactgaccgacacagagagggccaccctgatggatgagccctaccgcaagtccaagctgacatatgcacaggcaaggaagctgctgggcctggaggacaccgccttctttaagggcctgagatacggcaaggataacgccgaggcctctacactgatggagatgaaggcctatcacgccatcagcagggccctggagaaggagggcctgaaggacaagaagtccccactgaatctgtctcccgagctgcaggatgagatcggcaccgcctttagcctgttcaagaccgacgaggatatcacaggcagactgaaggacaggatccagccagagatcctggaggccctgctgaagcacatcagctttgataagttcgtgcagatcagcctgaaggccctgcggaggatcgtgccactgatggagcagggcaagaggtacgacgaggcctgcgccgaaatctacggcgatcactatggcaagaagaacacagaggagaaaatctacctgccccctatccccgccgatgagatcaggaaccctgtggtgctgcgcgccctgtctcaggcaagaaaagtgatcaacggagtggtgcgccggtacggcagccccgccagaatccacatcgagacagccagggaagtgggcaagtcctttaaggacagaaaggagatcgagaagaggcaggaggagaacagaaaggatagggagaaggccgccgccaagttcagagagtactttcctaatttcgtgggcgagccaaagtccaaggatatcctgaagctgaggctgtacgagcagcagcacggcaagtgtctgtattctggcaaggagatcaacctgggccgcctgaatgagaagggctatgtggagatcgaccacgccctgcctttttctcggacctgggacgatagcttcaacaataaggtgctggtgctgggctctgagaaccagaataagggcaaccagacaccctacgagtatttcaacggcaaggacaatagccgcgagtggcaggagtttaaggcaagggtggagacaagcaggttccctcggtccaagaagcagagaatcctgctgcagaagtttgacgaggatggcttcaaggagaggaacctgaatgacacccgctacgtgaatcggtttctgtgccagttcgtggccgatagaatgaggctgaccggcaagggcaagaagagagtgtttgcctccaacggccagatcacaaatctgctgaggggcttctggggcctgagaaaggtgagggcagagaacgacaggcaccacgcactggatgcagtggtggtggcatgttctaccgtggccatgcagcagaagatcacacgctttgtgcggtataaggagatgaatgccttcgacggcaagaccatcgataaggagacaggcgaggtgctgcaccagaagacacactttcctcagccatgggagttctttgcccaggaagtgatgatccgggtgtttggcaagcctgacggcaagccagagttcgaggaggccgataccctggagaagctgagaacactgctggcagagaagctgagctccaggcccgaggcagtgcacgagtacgtgaccccactgttcgtgtctagagcccccaacaggaagatgagcggccagggccacatggagacagtgaagtccgccaagagactggacgagggcgtgtctgtgctgagggtgcctctgacacagctgaagctgaaggatctggagaagatggtgaatcgcgagcgggagccaaagctgtatgaggccctgaaggcaaggctggaggcacacaaggacgatcctgccaaggcctttgccgagccattctacaagtatgataaggccggcaacagaacccagcaggtgaaggccgtgagggtggagcaggtgcagaagacaggcgtgtgggtgcgcaaccacaatggcatcgccgacaatgctaccatggtgcgggtggacgtgtttgagaagggcgataagtactatctggtgcccatctacagctggcaggtggccaagggcatcctgcctgatagagccgtggtgcagggcaaggacgaggaggattggcagctgatcgacgattccttcaactttaagttctctctgcaccccaatgacctggtggaagtgatcaccaagaaggccaggatgtttggctacttcgcctcctgccaccgcggcacaggcaacatcaatatccggatccacgacctggatcacaagatcggcaagaacggcatcctggagggcatcggcgtgaagacagccctgagcttccagaagtatcagatcgacgagctgggcaaggagatcagaccttgtaggctgaagaagcgcccacccgtgcggtccgagtccgccacccccgagtccgtgtccggctggcggctgttcaagaagatctcctagctagcaccagcctcaagaacacccgaatggagtctctaagctacataataccaacttacactttacaaaatgttgtcccccaaaatgtagccattcgtatctgctcctaataaaaagaaagtttcttcacattctaaaaaaaaaaaatggaaaaaaaaaaaacggaaaaaaaaaaaaggtaaaaaaaaaaaatataaaaaaaaaaaacataaaaaaaaaaaacgaaaaaaaaaaaacgtaaaaaaaaaaaactcaaaaaaaaaaaagataaaaaaaaaaaacctaaaaaaaaaaaatgtaaaaaaaaaaaagggaaaaaaaaaaaacgcaaaaaaaaaaaacacaaaaaaaaaaaatgcaaaaaaaaaaaatcgaaaaaaaaaaaatctaaaaaaaaaaaacgaaaaaaaaaaaacccaaaaaaaaaaaagacaaaaaaaaaaaatagaaaaaaaaaaaagttaaaaaaaaaaaactgaaaaaaaaaaaatttaaaaaaaaaaaatctcga

SEQ ID NO: 308 - RNA, 3975 nt, synthetic construct
  misc_feature 1..3975: note = Synthetic
  source 1..3975: mol_type = other RNA
gggaagctcagaataaacgctcaactttggccggatctgccaccatggacggctccggcggcggctcccccaagaagaagcggaaggtggaggacaagcggcccgccgccaccaagaaggccggccaggccaagaagaagaagggcggctccggcggcggcgccgccttcaagcccaactccatcaactacatcctgggcctggacatcggcatcgcctccgtgggctgggccatggtggagatcgacgaggaggagaaccccatccggctgatcgacctgggcgtgcgggtgttcgagcgggccgaggtgcccaagaccggcgactccctggccatggcccggcggctggcccggtccgtgcggcggctgacccggcggcgggcccaccggctgctgcggacccggcggctgctgaagcgggagggcgtgctgcaggccgccaacttcgacgagaacggcctgatcaagtccctgcccaacaccccctggcagctgcgggccgccgccctggaccggaagctgacccccctggagtggtccgccgtgctgctgcacctgatcaagcaccggggctacctgtcccagcggaagaacgagggcgagaccgccgacaaggagctgggcgccctgctgaagggcgtggccggcaacgcccacgccctgcagaccggcgacttccggacccccgccgagctggccctgaacaagttcgagaaggagtccggccacatccggaaccagcggtccgactactcccacaccttctcccggaaggacctgcaggccgagctgatcctgctgttcgagaagcagaaggagttcggcaacccccacgtgtccggcggcctgaaggagggcatcgagaccctgctgatgacccagcggcccgccctgtccggcgacgccgtgcagaagatgctgggccactgcaccttcgagcccgccgagcccaaggccgccaagaacacctacaccgccgagcggttcatctggctgaccaagctgaacaacctgcggatcctggagcagggctccgagcggcccctgaccgacaccgagcgggccaccctgatggacgagccctaccggaagtccaagctgacctacgcccaggcccggaagctgctgggcctggaggacaccgccttcttcaagggcctgcggtacggcaaggacaacgccgaggcctccaccctgatggagatgaaggcctaccacgccatctcccgggccctggagaaggagggcctgaaggacaagaagtcccccctgaacctgtcccccgagctgcaggacgagatcggcaccgccttctccctgttcaagaccgacgaggacatcaccggccggctgaaggaccggatccagcccgagatcctggaggccctgctgaagcacatctccttcgacaagttcgtgcagatctccctgaaggccctgcggcggatcgtgcccctgatggagcagggcaagcggtacgacgaggcctgcgccgagatctacggcgaccactacggcaagaagaacaccgaggagaagatctacctgccccccatccccgccgacgagatccggaaccccgtggtgctgcgggccctgtcccaggcccggaaggtgatcaacggcgtggtgcggcggtacggctcccccgcccggatccacatcgagaccgcccgggaggtgggcaagtccttcaaggaccggaaggagatcgagaagcggcaggaggagaaccggaaggaccgggagaaggccgccgccaagttccgggagtacttccccaacttcgtgggcgagcccaagtccaaggacatcctgaagctgcggctgtacgagcagcagcacggcaagtgcctgtactccggcaaggagatcaacctgggccggctgaacgagaagggctacgtggagatcgaccacgccctgcccttctcccggacctgggacgactccttcaacaacaaggtgctggtgctgggctccgagaaccagaacaagggcaaccagaccccctacgagtacttcaacggcaaggacaactcccgggagtggcaggagttcaaggcccgggtggagacctcccggttcccccggtccaagaagcagcggatcctgctgcagaagttcgacgaggacggcttcaaggagcggaacctgaacgacacccggtacgtgaaccggttcctgtgccagttcgtggccgaccggatgcggctgaccggcaagggcaagaagcgggtgttcgcctccaacggccagatcaccaacctgctgcggggcttctggggcctgcggaaggtgcgggccgagaacgaccggcaccacgccctggacgccgtggtggtggcctgctccaccgtggccatgcagcagaagatcacccggttcgtgcggtacaaggagatgaacgccttcgacggcaagaccatcgacaaggagaccggcgaggtgctgcaccagaagacccacttcccccagccctgggagttcttcgcccaggaggtgatgatccgggtgttcggcaagcccgacggcaagcccgagttcgaggaggccgacaccctggagaagctgcggaccctgctggccgagaagctgtcctcccggcccgaggccgtgcacgagtacgtgacccccctgttcgtgtcccgggcccccaaccggaagatgtccggccagggccacatggagaccgtgaagtccgccaagcggctggacgagggcgtgtccgtgctgcgggtgcccctgacccagctgaagctgaaggacctggagaagatggtgaaccgggagcgggagcccaagctgtacgaggccctgaaggcccggctggaggcccacaaggacgaccccgccaaggccttcgccgagcccttctacaagtacgacaaggccggcaaccggacccagcaggtgaaggccgtgcgggtggagcaggtgcagaagaccggcgtgtgggtgcggaaccacaacggcatcgccgacaacgccaccatggtgcgggtggacgtgttcgagaagggcgacaagtactacctggtgcccatctactcctggcaggtggccaagggcatcctgcccgaccgggccgtggtgcagggcaaggacgaggaggactggcagctgatcgacgactccttcaacttcaagttctccctgcaccccaacgacctggtggaggtgatcaccaagaaggcccggatgttcggctacttcgcctcctgccaccggggcaccggcaacatcaacatccggatccacgacctggaccacaagatcggcaagaacggcatcctggagggcatcggcgtgaagaccgccctgtccttccagaagtaccagatcgacgagctgggcaaggagatccggccctgccggctgaagaagcggccccccgtgcggtccgagtccgccacccccgagtccgtgtccggctggcggctgttcaagaagatctcctagctagcaccagcctcaagaacacccgaatggagtctctaagctacataataccaacttacactttacaaaatgttgtcccccaaaatgtagccattcgtatctgctcctaataaaaagaaagtttcttcacattctaaaaaaaaaaaatggaaaaaaaaaaaacggaaaaaaaaaaaaggtaaaaaaaaaaaatataaaaaaaaaaaacataaaaaaaaaaaacgaaaaaaaaaaaacgtaaaaaaaaaaaactcaaaaaaaaaaaagataaaaaaaaaaaacctaaaaaaaaaaaatgtaaaaaaaaaaaagggaaaaaaaaaaaacgcaaaaaaaaaaaacacaaaaaaaaaaaatgcaaaaaaaaaaaatcgaaaaaaaaaaaatctaaaaaaaaaaaacgaaaaaaaaaaaacccaaaaaaaaaaaagacaaaaaaaaaaaatagaaaaaaaaaaaagttaaaaaaaaaaaactgaaaaaaaaaaaatttaaaaaaaaaaaatctcga

SEQ ID NO: 309 - RNA, 3974 nt, synthetic construct
  misc_feature 1..3974: note = Synthetic
  source 1..3974: mol_type = other RNA
gggaagctcagaataaacgctcaactttggccggatctgccaccatggacggctccggcggcggctcccccaagaagaagcggaaggtggaggacaagcggcccgccgccaccaagaaggccggccaggccaagaagaagaagggcggctccggcggcgccgccttcaagcccaaccccatcaactacatcctgggcctggacatcggcatcgcctccgtgggctgggccatggtggagatcgacgaggaggagaaccccatccggctgatcgacctgggcgtgcgggtgttcgagcgggccgaggtgcccaagaccggcgactccctggccatggcccggcggctggcccggtccgtgcggcggctgacccggcggcgggcccaccggctgctgcgggcccggcggctgctgaagcgggagggcgtgctgcaggccgccgacttcgacgagaacggcctgatcaagtccctgcccaacaccccctggcagctgcgggccgccgccctggaccggaagctgacccccctggagtggtccgccgtgctgctgcacctgatcaagcaccggggctacctgtcccagcggaagaacgagggcgagaccgccgacaaggagctgggcgccctgctgaagggcgtggccgacaacgcccacgccctgcagaccggcgacttccggacccccgccgagctggccctgaacaagttcgagaaggagtgcggccacatccggaaccagcggggcgactactcccacaccttctcccggaaggacctgcaggccgagctgaacctgctgttcgagaagcagaaggagttcggcaacccccacgtgtccggcggcctgaaggagggcatcgagaccctgctgatgacccagcggcccgccctgtccggcgacgccgtgcagaagatgctgggccactgcaccttcgagcccgccgagcccaaggccgccaagaacacctacaccgccgagcggttcatctggctgaccaagctgaacaacctgcggatcctggagcagggctccgagcggcccctgaccgacaccgagcgggccaccctgatggacgagccctaccggaagtccaagctgacctacgcccaggcccggaagctgctgtccctggaggacaccgccttcttcaagggcctgcggtacggcaaggacaacgccgaggcctccaccctgatggagatgaaggcctaccacaccatctcccgggccctggagaaggagggcctgaaggacaagaagtcccccctgaacctgtcccccgagctgcaggacgagatcggcaccgccttctccctgttcaagaccgacgaggacatcaccggccggctgaaggaccggatccagcccgagatcctggaggccctgctgaagcacatctccttcgacaagttcgtgcagatctccctgaaggccctgcggcggatcgtgcccctgatggagcagggcaagcggtacgacgaggcctgcgccgagatctacggcgaccactacggcaagaagaacaccgaggagaagatctacctgccccccatccccgccgacgagatccggaaccccgtggtgctgcgggccctgtcccaggcccggaaggtgatcaacggcgtggtgcggcggtacggctcccccgcccggatccacatcgagaccgcccgggaggtgggcaagtccttcaaggaccggaaggagatcgagaagcggcaggaggagaaccggaaggaccgggagaaggccgccgccaagttccgggagtacttccccaacttcgtgggcgagcccaagtccaaggacatcctgaagctgcggctgtacgagcagcagcacggcaagtgcctgtactccggcaaggagatcaacctgggccggctgaacgagaagggctacgtggagatcgaccacgccctgcccttctcccggacctgggacgactccttcaacaacaaggtgctggtgctgggctccgagaaccagaacaagggcaaccagaccccctacgagtacttcaacggcaaggacaactcccgggagtggcaggagttcaaggcccgggtggagacctcccggttcccccggtccaagaagcagcggatcctgctgcagaagttcgacgaggacggcttcaaggagcggaacctgaacgacacccggtacgtgaaccggttcctgtgccagttcgtggccgaccggatgcggctgaccggcaagggcaagaagcgggtgttcgcctccaacggccagatcaccaacctgctgcggggcttctggggcctgcggaaggtgcgggccgagaacgaccggcaccacgccctggacgccgtggtggtggcctgctccaccgtggccatgcagcagaagatcacccggttcgtgcggtacaaggagatgaacgccttcgacggcaagaccatcgacaaggagaccggcgaggtgctgcaccagaagacccacttcccccagccctgggagttcttcgcccaggaggtgatgatccgggtgttcggcaagcccgacggcaagcccgagttcgaggaggccgacacccccgagaagctgcggaccctgctggccgagaagctgtcctcccggcccgaggccgtgcacgagtacgtgacccccctgttcgtgtcccgggcccccaaccggaagatgtccggccagggccacatggagaccgtgaagtccgccaagcggctggacgagggcgtgtccgtgctgcgggtgcccctgacccagctgaagctgaaggacctggagaagatggtgaaccgggagcgggagcccaagctgtacgaggccctgaaggcccggctggaggcccacaaggacgaccccgccaaggccttcgccgagcccttctacaagtacgacaaggccggcaaccggacccagcaggtgaaggccgtgcgggtggagcaggtgcagaagaccggcgtgtgggtgcggaaccacaacggcatcgccgacaacgccaccatggtgcgggtggacgtgttcgagaagggcgacaagtactacctggtgcccatctactcctggcaggtggccaagggcatcctgcccgaccgggccgtggtggcctacgccgacgaggaggactggaccgtgatcgacgagtccttccggttcaagttcgtgctgtactccaacgacctgatcaaggtgcagctgaagaaggactccttcctgggctacttctccggcctggaccgggccaccggcgccatctccctgcgggagcacgacctggagaagtccaagggcaaggacggcatgcaccggatcggcgtgaagaccgccctgtccttccagaagtaccagatcgacgagatgggcaaggagatccggccctgccggctgaagaagcggccccccgtgcggtccgagtccgccacccccgagtccgtgtccggctggcggctgttcaagaagatctcctagctagcaccagcctcaagaacacccgaatggagtctctaagctacataataccaacttacactttacaaaatgttgtcccccaaaatgtagccattcgtatctgctcctaataaaaagaaagtttcttcacattctctcgagaaaaaaaaaaaatggaaaaaaaaaaaacggaaaaaaaaaaaaggtaaaaaaaaaaaatataaaaaaaaaaaacataaaaaaaaaaaacgaaaaaaaaaaaacgtaaaaaaaaaaaactcaaaaaaaaaaaagataaaaaaaaaaaacctaaaaaaaaaaaatgtaaaaaaaaaaaagggaaaaaaaaaaaacgcaaaaaaaaaaaacacaaaaaaaaaaaatgcaaaaaaaaaaaatcgaaaaaaaaaaaatctaaaaaaaaaaaacgaaaaaaaaaaaacccaaaaaaaaaaaagacaaaaaaaaaaaatagaaaaaaaaaaaagttaaaaaaaaaaaactgaaaaaaaaaaaatttaaaaaaaaaaaatctag

SEQ ID NO: 310 - protein, 1120 aa, synthetic construct; identical to SEQ ID NO: 11
  REGION 1..1120: note = Synthetic

SEQ ID NO: 311 - protein, 1103 aa, synthetic construct
  REGION 1..1103: note = Synthetic
MAAFKPNSINYILGLDIGIASVGWAMVEIDEEENPIRLIDLGVRVFERAEVPKTGDSLAMARRLARSVRRLTRRRAHRLLRTRRLLKREGVLQAANFDENGLIKSLPNTPWQLRAAALDRKLTPLEWSAVLLHLIKHRGYLSQRKNEGETADKELGALLKGVAGNAHALQTGDFRTPAELALNKFEKESGHIRNQRSDYSHTFSRKDLQAELILLFEKQKEFGNPHVSGGLKEGIETLLMTQRPALSGDAVQKMLGHCTFEPAEPKAAKNTYTAERFIWLTKLNNLRILEQGSERPLTDTERATLMDEPYRKSKLTYAQARKLLGLEDTAFFKGLRYGKDNAEASTLMEMKAYHAISRALEKEGLKDKKSPLNLSPELQDEIGTAFSLFKTDEDITGRLKDRIQPEILEALLKHISFDKFVQISLKALRRIVPLMEQGKRYDEACAEIYGDHYGKKNTEEKIYLPPIPADEIRNPVVLRALSQARKVINGVVRRYGSPARIHIETAREVGKSFKDRKEIEKRQEENRKDREKAAAKFREYFPNFVGEPKSKDILKLRLYEQQHGKCLYSGKEINLGRLNEKGYVEIDHALPFSRTWDDSFNNKVLVLGSENQNKGNQTPYEYFNGKDNSREWQEFKARVETSRFPRSKKQRILLQKFDEDGFKERNLNDTRYVNRFLCQFVADRMRLTGKGKKRVFASNGQITNLLRGFWGLRKVRAENDRHHALDAVVVACSTVAMQQKITRFVRYKEMNAFDGKTIDKETGEVLHQKTHFPQPWEFFAQEVMIRVFGKPDGKPEFEEADTLEKLRTLLAEKLSSRPEAVHEYVTPLFVSRAPNRKMSGQGHMETVKSAKRLDEGVSVLRVPLTQLKLKDLEKMVNREREPKLYEALKARLEAHKDDPAKAFAEPFYKYDKAGNRTQQVKAVRVEQVQKTGVWVRNHNGIADNATMVRVDVFEKGDKYYLVPIYSWQVAKGILPDRAVVQGKDEEDWQLIDDSFNFKFSLHPNDLVEVITKKARMFGYFASCHRGTGNINIRIHDLDHKIGKNGILEGIGVKTALSFQKYQIDELGKEIRPCRLKKRPPVRSGKRTADGSEFESPKKKRKVE

SEQ ID NO: 312 - protein, 1139 aa, synthetic construct; identical to SEQ ID NO: 12
  REGION 1..1139: note = Synthetic

SEQ ID NO: 313 - protein, 1139 aa, synthetic construct
  REGION 1..1139: note = Synthetic
MDGSGGGSPKKKRKVEDKRPAATKKAGQAKKKKGGSGGGAAFKPNSINYILGLDIGIASVGWAMVEIDEEENPIRLIDLGVRVFERAEVPKTGDSLAMARRLARSVRRLTRRRAHRLLRTRRLLKREGVLQAANFDENGLIKSLPNTPWQLRAAALDRKLTPLEWSAVLLHLIKHRGYLSQRKNEGETADKELGALLKGVAGNAHALQTGDFRTPAELALNKFEKESGHIRNQRSDYSHTFSRKDLQAELILLFEKQKEFGNPHVSGGLKEGIETLLMTQRPALSGDAVQKMLGHCTFEPAEPKAAKNTYTAERFIWLTKLNNLRILEQGSERPLTDTERATLMDEPYRKSKLTYAQARKLLGLEDTAFFKGLRYGKDNAEASTLMEMKAYHAISRALEKEGLKDKKSPLNLSPELQDEIGTAFSLFKTDEDITGRLKDRIQPEILEALLKHISFDKFVQISLKALRRIVPLMEQGKRYDEACAEIYGDHYGKKNTEEKIYLPPIPADEIRNPVVLRALSQARKVINGVVRRYGSPARIHIETAREVGKSFKDRKEIEKRQEENRKDREKAAAKFREYFPNFVGEPKSKDILKLRLYEQQHGKCLYSGKEINLGRLNEKGYVEIDHALPFSRTWDDSFNNKVLVLGSENQNKGNQTPYEYFNGKDNSREWQEFKARVETSRFPRSKKQRILLQKFDEDGFKERNLNDTRYVNRFLCQFVADRMRLTGKGKKRVFASNGQITNLLRGFWGLRKVRAENDRHHALDAVVVACSTVAMQQKITRFVRYKEMNAFDGKTIDKETGEVLHQKTHFPQPWEFFAQEVMIRVFGKPDGKPEFEEADTLEKLRTLLAEKLSSRPEAVHEYVTPLFVSRAPNRKMSGQGHMETVKSAKRLDEGVSVLRVPLTQLKLKDLEKMVNREREPKLYEALKARLEAHKDDPAKAFAEPFYKYDKAGNRTQQVKAVRVEQVQKTGVWVRNHNGIADNATMVRVDVFEKGDKYYLVPIYSWQVAKGILPDRAVVQGKDEEDWQLIDDSFNFKFSLHPNDLVEVITKKARMFGYFASCHRGTGNINIRIHDLDHKIGKNGILEGIGVKTALSFQKYQIDELGKEIRPCRLKKRPPVRSESATPESVSGWRLFKKIS

SEQ ID NO: 314 - protein, 1139 aa, synthetic construct; identical to SEQ ID NO: 313
  REGION 1..1139: note = Synthetic

SEQ ID NO: 315 - protein, 1137 aa, synthetic construct
  REGION 1..1137: note = Synthetic
MDGSGGGSPKKKRKVEDKRPAATKKAGQAKKKKGGSGGAAFKPNPINYILGLDIGIASVGWAMVEIDEEENPIRLIDLGVRVFERAEVPKTGDSLAMARRLARSVRRLTRRRAHRLLRARRLLKREGVLQAADFDENGLIKSLPNTPWQLRAAALDRKLTPLEWSAVLLHLIKHRGYLSQRKNEGETADKELGALLKGVADNAHALQTGDFRTPAELALNKFEKECGHIRNQRGDYSHTFSRKDLQAELNLLFEKQKEFGNPHVSGGLKEGIETLLMTQRPALSGDAVQKMLGHCTFEPAEPKAAKNTYTAERFIWLTKLNNLRILEQGSERPLTDTERATLMDEPYRKSKLTYAQARKLLSLEDTAFFKGLRYGKDNAEASTLMEMKAYHTISRALEKEGLKDKKSPLNLSPELQDEIGTAFSLFKTDEDITGRLKDRIQPEILEALLKHISFDKFVQISLKALRRIVPLMEQGKRYDEACAEIYGDHYGKKNTEEKIYLPPIPADEIRNPVVLRALSQARKVINGVVRRYGSPARIHIETAREVGKSFKDRKEIEKRQEENRKDREKAAAKFREYFPNFVGEPKSKDILKLRLYEQQHGKCLYSGKEINLGRLNEKGYVEIDHALPFSRTWDDSFNNKVLVLGSENQNKGNQTPYEYFNGKDNSREWQEFKARVETSRFPRSKKQRILLQKFDEDGFKERNLNDTRYVNRFLCQFVADRMRLTGKGKKRVFASNGQITNLLRGFWGLRKVRAENDRHHALDAVVVACSTVAMQQKITRFVRYKEMNAFDGKTIDKETGEVLHQKTHFPQPWEFFAQEVMIRVFGKPDGKPEFEEADTPEKLRTLLAEKLSSRPEAVHEYVTPLFVSRAPNRKMSGQGHMETVKSAKRLDEGVSVLRVPLTQLKLKDLEKMVNREREPKLYEALKARLEAHKDDPAKAFAEPFYKYDKAGNRTQQVKAVRVEQVQKTGVWVRNHNGIADNATMVRVDVFEKGDKYYLVPIYSWQVAKGILPDRAVVAYADEEDWTVIDESFRFKFVLYSNDLIKVQLKKDSFLGYFSGLDRATGAISLREHDLEKSKGKDGMHRIGVKTALSFQKYQIDEMGKEIRPCRLKKRPPVRSESATPESVSGWRLFKKIS

SEQ ID NO: 316 - RNA, 3363 nt, synthetic construct
  misc_feature 1..3363: note = Synthetic
  source 1..3363: mol_type = other RNA
atggacggctccggcggcggctcccccaagaagaagcggaaggtggaggacaagcggcccgccgccaccaagaaggccggccaggccaagaagaagaagggcggctccggcggcggcgccgccttcaagcccaaccccatcaactacatcctgggcctggacatcggcatcgcctccgtgggctgggccatggtggagatcgacgaggaggagaaccccatccggctgatcgacctgggcgtgcgggtgttcgagcgggccgaggtgcccaagaccggcgactccctggccatggcccggcggctggcccggtccgtgcggcggctgacccggcggcgggcccaccggctgctgcgggcccggcggctgctgaagcgggagggcgtgctgcaggccgccgacttcgacgagaacggcctgatcaagtccctgcccaacaccccctggcagctgcgggccgccgccctggaccggaagctgacccccctggagtggtccgccgtgctgctgcacctgatcaagcaccggggctacctgtcccagcggaagaacgagggcgagaccgccgacaaggagctgggcgccctgctgaagggcgtggccaacaacgcccacgccctgcagaccggcgacttccggacccccgccgagctggccctgaacaagttcgagaaggagtccggccacatccggaaccagcggggcgactactcccacaccttctcccggaaggacctgcaggccgagctgatcctgctgttcgagaagcagaaggagttcggcaacccccacgtgtccggcggcctgaaggagggcatcgagaccctgctgatgacccagcggcccgccctgtccggcgacgccgtgcagaagatgctgggccactgcaccttcgagcccgccgagcccaaggccgccaagaacacctacaccgccgagcggttcatctggctgaccaagctgaacaacctgcggatcctggagcagggctccgagcggcccctgaccgacaccgagcgggccaccctgatggacgagccctaccggaagtccaagctgacctacgcccaggcccggaagctgctgggcctggaggacaccgccttcttcaagggcctgcggtacggcaaggacaacgccgaggcctccaccctgatggagatgaaggcctaccacgccatctcccgggccctggagaaggagggcctgaaggacaagaagtcccccctgaacctgtcctccgagctgcaggacgagatcggcaccgccttctccctgttcaagaccgacgaggacatcaccggccggctgaaggaccgggtgcagcccgagatcctggaggccctgctgaagcacatctccttcgacaagttcgtgcagatctccctgaaggccctgcggcggatcgtgcccctgatggagcagggcaagcggtacgacgaggcctgcgccgagatctacggcgaccactacggcaagaagaacaccgaggagaagatctacctgccccccatccccgccgacgagatccggaaccccgtggtgctgcgggccctgtcccaggcccggaaggtgatcaacggcgtggtgcggcggtacggctcccccgcccggatccacatcgagaccgcccgggaggtgggcaagtccttcaaggaccggaaggagatcgagaagcggcaggaggagaaccggaaggaccgggagaaggccgccgccaagttccgggagtacttccccaacttcgtgggcgagcccaagtccaaggacatcctgaagctgcggctgtacgagcagcagcacggcaagtgcctgtactccggcaaggagatcaacctggtgcggctgaacgagaagggctacgtggagatcgaccacgccctgcccttctcccggacctgggacgactccttcaacaacaaggtgctggtgctgggctccgagaaccagaacaagggcaaccagaccccctacgagtacttcaacggcaaggacaactcccgggagtggcaggagttcaaggcccgggtggagacctcccggttcccccggtccaagaagcagcggatcctgctgcagaagttcgacgaggacggcttcaaggagtgcaacctgaacgacacccggtacgtgaaccggttcctgtgccagttcgtggccgaccacatcctgctgaccggcaagggcaagcggcgggtgttcgcctccaacggccagatcaccaacctgctgcggggcttctggggcctgcggaaggtgcgggccgagaacgaccggcaccacgccctggacgccgtggtggtggcctgctccaccgtggccatgcagcagaagatcacccggttcgtgcggtacaaggagatgaacgccttcgacggcaagaccatcgacaaggagaccggcaaggtgctgcaccagaagacccacttcccccagccctgggagttcttcgcccaggaggtgatgatccgggtgttcggcaagcccgacggcaagcccgagttcgaggaggccgacacccccgagaagctgcggaccctgctggccgagaagctgtcctcccggcccgaggccgtgcacgagtacgtgacccccctgttcgtgtcccgggcccccaaccggaagatgtccggcgcccacaaggacaccctgcggtccgccaagcggttcgtgaagcacaacgagaagatctccgtgaagcgggtgtggctgaccgagatcaagctggccgacctggagaacatggtgaactacaagaacggccgggagatcgagctgtacgaggccctgaaggcccggctggaggcctacggcggcaacgccaagcaggccttcgaccccaaggacaaccccttctacaagaagggcggccagctggtgaaggccgtgcgggtggagaagacccaggagtccggcgtgctgctgaacaagaagaacgcctacaccatcgccgacaacggcgacatggtgcgggtggacgtgttctgcaaggtggacaagaagggcaagaaccagtacttcatcgtgcccatctacgcctggcaggtggccgagaacatcctgcccgacatcgactgcaagggctaccggatcgacgactcctacaccttctgcttctccctgcacaagtacgacctgatcgccttccagaaggacgagaagtccaaggtggagttcgcctactacatcaactgcgactcctccaacggccggttctacctggcctggcacgacaagggctccaaggagcagcagttccggatctccacccagaacctggtgctgatccagaagtaccaggtgaacgagctgggcaaggagatccggccctgccggctgaagaagcggccccccgtgcggtag

SEQ ID NO: 317 - RNA, 3312 nt, synthetic construct
  misc_feature 1..3312: note = Synthetic
  source 1..3312: mol_type = other RNA
atggcagcattcaagccgaactcgatcaactacatcctgggactggacatcggaatcgcatcggtcggatgggcaatggtcgaaatcgacgaagaagaaaacccgatcagactgatcgacctgggagtcagagtcttcgaaagagcagaagtcccgaagacaggagactcgctggcaatggcaagaagactggcaagatcggtcagaagactgacaagaagaagagcacacagactgctgagaacaagaagactgctgaagagagaaggagtcctgcaggcagcaaacttcgacgaaaacggactgatcaagtcgctgccgaacacaccgtggcagctgagagcagcagcactggacagaaagctgacaccgctggaatggtcggcagtcctgctgcacctgatcaagcacagaggatacctgtcgcagagaaagaacgaaggagaaacagcagacaaggaactgggagcactgctgaagggagtcgcaggaaacgcacacgcactgcagacaggagacttcagaacaccggcagaactggcactgaacaagttcgaaaaggaatcgggacacatcagaaaccagagatcggactactcgcacacattctcgagaaaggacctgcaggcagaactgatcctgctgttcgaaaagcagaaggaattcggaaacccgcacgtctcgggaggactgaaggaaggaatcgaaacactgctgatgacacagagaccggcactgtcgggagacgcagtccagaagatgctgggacactgcacattcgaaccggcagaaccgaaggcagcaaagaacacatacacagcagaaagattcatctggctgacaaagctgaacaacctgagaatcctggaacagggatcggaaagaccgctgacagacacagaaagagcaacactgatggacgaaccgtacagaaagtcgaagctgacatacgcacaggcaagaaagctgctgggactggaagacacagcattcttcaagggactgagatacggaaaggacaacgcagaagcatcgacactgatggaaatgaaggcataccacgcaatctcgagagcactggaaaaggaaggactgaaggacaagaagtcgccgctgaacctgtcgccggaactgcaggacgaaatcggaacagcattctcgctgttcaagacagacgaagacatcacaggaagactgaaggacagaatccagccggaaatcctggaagcactgctgaagcacatctcgttcgacaagttcgtccagatctcgctgaaggcactgagaagaatcgtcccgctgatggaacagggaaagagatacgacgaagcatgcgcagaaatctacggagaccactacggaaagaagaacacagaagaaaagatctacctgccgccgatcccggcagacgaaatcagaaacccggtcgtcctgagagcactgtcgcaggcaagaaaggtcatcaacggagtcgtcagaagatacggatcgccggcaagaatccacatcgaaacagcaagagaagtcggaaagtcgttcaaggacagaaaggaaatcgaaaagagacaggaagaaaacagaaaggacagagaaaaggcagcagcaaagttcagagaatacttcccgaacttcgtcggagaaccgaagtcgaaggacatcctgaagctgagactgtacgaacagcagcacggaaagtgcctgtactcgggaaaggaaatcaacctgggaagactgaacgaaaagggatacgtcgaaatcgaccacgcactgccgttctcgagaacatgggacgactcgttcaacaacaaggtcctggtcctgggatcggaaaaccagaacaagggaaaccagacaccgtacgaatacttcaacggaaaggacaactcgagagaatggcaggaattcaaggcaagagtcgaaacatcgagattcccgagatcgaagaagcagagaatcctgctgcagaagttcgacgaagacggattcaaggaaagaaacctgaacgacacaagatacgtcaacagattcctgtgccagttcgtcgcagacagaatgagactgacaggaaagggaaagaagagagtcttcgcatcgaacggacagatcacaaacctgctgagaggattctggggactgagaaaggtcagagcagaaaacgacagacaccacgcactggacgcagtcgtcgtcgcatgctcgacagtcgcaatgcagcagaagatcacaagattcgtcagatacaaggaaatgaacgcattcgacggaaagacaatcgacaaggaaacaggagaagtcctgcaccagaagacacacttcccgcagccgtgggaattcttcgcacaggaagtcatgatcagagtcttcggaaagccggacggaaagccggaattcgaagaagcagacacactggaaaagctgagaacactgctggcagaaaagctgtcgtcgagaccggaagcagtccacgaatacgtcacaccgctgttcgtctcgagagcaccgaacagaaagatgtcgggacagggacacatggaaacagtcaagtcggcaaagagactggacgaaggagtctcggtcctgagagtcccgctgacacagctgaagctgaaggacctggaaaagatggtcaacagagaaagagaaccgaagctgtacgaagcactgaaggcaagactggaagcacacaaggacgacccggcaaaggcattcgcagaaccgttctacaagtacgacaaggcaggaaacagaacacagcaggtcaaggcagtcagagtcgaacaggtccagaagacaggagtctgggtcagaaaccacaacggaatcgcagacaacgcaacaatggtcagagtagacgtcttcgaaaagggagacaagtactacctggtcccgatctactcgtggcaggtcgcaaagggaatcctgccggacagagcagtcgtccagggaaaggacgaagaagactggcagctgatcgacgactcgttcaacttcaagttctcgctgcacccgaacgacctggtcgaagtcatcacaaagaaggcaagaatgttcggatacttcgcatcgtgccacagaggaacaggaaacatcaacatcagaatccacgacctggaccacaagatcggaaagaacggaatcctggaaggaatcggagtcaagacagcactgtcgttccagaagtaccagatcgacgaactgggaaaggaaatcagaccgtgcagactgaagaagagaccgccggtcagatccggaaagagaacagcagacggatcggaattcgaatcgccgaagaagaagagaaaggtcgaatga

SEQ ID NO: 318 - RNA, 3420 nt, synthetic construct
  misc_feature 1..3420: note = Synthetic
  source 1..3420: mol_type = other RNA
atggacggctccggcggcggctcccccaagaagaagcggaaggtggaggacaagcggcccgccgccaccaagaaggccggccaggccaagaagaagaagggcggctccggcggcggcgccgccttcaagcccaaccccatcaactacatcctgggcctggacatcggcatcgcctccgtgggctgggccatggtggagatcgacgaggaggagaaccccatccggctgatcgacctgggcgtgcgggtgttcgagcgggccgaggtgcccaagaccggcgactccctggccatggcccggcggctggcccggtccgtgcggcggctgacccggcggcgggcccaccggctgctgcgggcccggcggctgctgaagcgggagggcgtgctgcaggccgccgacttcgacgagaacggcctgatcaagtccctgcccaacaccccctggcagctgcgggccgccgccctggaccggaagctgacccccctggagtggtccgccgtgctgctgcacctgatcaagcaccggggctacctgtcccagcggaagaacgagggcgagaccgccgacaaggagctgggcgccctgctgaagggcgtggccaacaacgcccacgccctgcagaccggcgacttccggacccccgccgagctggccctgaacaagttcgagaaggagtccggccacatccggaaccagcggggcgactactcccacaccttctcccggaaggacctgcaggccgagctgatcctgctgttcgagaagcagaaggagttcggcaacccccacgtgtccggcggcctgaaggagggcatcgagaccctgctgatgacccagcggcccgccctgtccggcgacgccgtgcagaagatgctgggccactgcaccttcgagcccgccgagcccaaggccgccaagaacacctacaccgccgagcggttcatctggctgaccaagctgaacaacctgcggatcctggagcagggctccgagcggcccctgaccgacaccgagcgggccaccctgatggacgagccctaccggaagtccaagctgacctacgcccaggcccggaagctgctgggcctggaggacaccgccttcttcaagggcctgcggtacggcaaggacaacgccgaggcctccaccctgatggagatgaaggcctaccacgccatctcccgggccctggagaaggagggcctgaaggacaagaagtcccccctgaacctgtcctccgagctgcaggacgagatcggcaccgccttctccctgttcaagaccgacgaggacatcaccggccggctgaaggaccgggtgcagcccgagatcctggaggccctgctgaagcacatctccttcgacaagttcgtgcagatctccctgaaggccctgcggcggatcgtgcccctgatggagcagggcaagcggtacgacgaggcctgcgccgagatctacggcgaccactacggcaagaagaacaccgaggagaagatctacctgccccccatccccgccgacgagatccggaaccccgtggtgctgcgggccctgtcccaggcccggaaggtgatcaacggcgtggtgcggcggtacggctcccccgcccggatccacatcgagaccgcccgggaggtgggcaagtccttcaaggaccggaaggagatcgagaagcggcaggaggagaaccggaaggaccgggagaaggccgccgccaagttccgggagtacttccccaacttcgtgggcgagcccaagtccaaggacatcctgaagctgcggctgtacgagcagcagcacggcaagtgcctgtactccggcaaggagatcaacctggtgcggctgaacgagaagggctacgtggagatcgaccacgccctgcccttctcccggacctgggacgactccttcaacaacaaggtgctggtgctgggctccgagaaccagaacaagggcaaccagaccccctacgagtacttcaacggcaaggacaactcccgggagtggcaggagttcaaggcccgggtggagacctcccggttcccccggtccaagaagcagcggatcctgctgcagaagttcgacgaggacggcttcaaggagtgcaacctgaacgacacccggtacgtgaaccggttcctgtgccagttcgtggccgaccacatcctgctgaccggcaagggcaagcggcgggtgttcgcctccaacggccagatcaccaacctgctgcggggcttctggggcctgcggaaggtgcgggccgagaacgaccggcaccacgccctggacgccgtggtggtggcctgctccaccgtggccatgcagcagaagatcacccggttcgtgcggtacaaggagatgaacgccttcgacggcaagaccatcgacaaggagaccggcaaggtgctgcaccagaagacccacttcccccagccctgggagttcttcgcccaggaggtgatgatccgggtgttcggcaagcccgacggcaagcccgagttcgaggaggccgacacccccgagaagctgcggaccctgctggccgagaagctgtcctcccggcccgaggccgtgcacgagtacgtgacccccctgttcgtgtcccgggcccccaaccggaagatgtccggcgcccacaaggacaccctgcggtccgccaagcggttcgtgaagcacaacgagaagatctccgtgaagcgggtgtggctgaccgagatcaagctggccgacctggagaacatggtgaactacaagaacggccgggagatcgagctgtacgaggccctgaaggcccggctggaggcctacggcggcaacgccaagcaggccttcgaccccaaggacaaccccttctacaagaagggcggccagctggtgaaggccgtgcgggtggagaagacccaggagtccggcgtgctgctgaacaagaagaacgcctacaccatcgccgacaacggcgacatggtgcgggtggacgtgttctgcaaggtggacaagaagggcaagaaccagtacttcatcgtgcccatctacgcctggcaggtggccgagaacatcctgcccgacatcgactgcaagggctaccggatcgacgactcctacaccttctgcttctccctgcacaagtacgacctgatcgccttccagaaggacgagaagtccaaggtggagttcgcctactacatcaactgcgactcctccaacggccggttctacctggcctggcacgacaagggctccaaggagcagcagttccggatctccacccagaacctggtgctgatccagaagtaccaggtgaacgagctgggcaaggagatccggccctgccggctgaagaagcggccccccgtgcggtccgagtccgccacccccgagtccgtgtccggctggcggctgttcaagaagatctcctag

SEQ ID NO: 319 - RNA, 3420 nt, synthetic construct
  misc_feature 1..3420: note = Synthetic
  source 1..3420: mol_type = other RNA
atggacggctccggcggcggctcccccaagaagaagcggaaggtggaggacaagcggcccgccgccaccaagaaggccggccaggccaagaagaagaagggcggctccggcggcggcgcagcattcaagccaaactcaatcaattacatcctgggactggacatcggcatcgcatccgtcgggtgggctatggtcgaaatcgacgaggaggagaaccccatccgcctgatcgatctgggcgtgcgcgtgtttgagagggcagaggtgcctaagaccggcgacagcctggccatggcacggagactggcacgctccgtgaggcgcctgacccggagaagggcccacagactgctgaggacacgccggctgctgaagagggagggcgtgctgcaggccgccaacttcgatgagaatggcctgatcaagtccctgcccaataccccttggcagctgagggcagccgccctggaccgcaagctgacacctctggagtggtccgccgtgctgctgcacctgatcaagcaccggggctacctgtctcagagaaagaacgagggcgagacagccgataaggagctgggcgccctgctgaagggagtggcaggaaatgcacacgccctgcagaccggcgactttcgcacaccagccgagctggccctgaacaagttcgagaaggagagcggccacatccgcaatcagcggtctgactatagccacaccttctcccggaaggatctgcaggccgagctgatcctgctgtttgagaagcagaaggagttcggcaacccacacgtgtctggcggcctgaaggagggcatcgagacactgctgatgacacagcggcccgccctgagcggcgacgcagtgcagaagatgctgggacactgcacctttgagccagccgagcccaaggccgccaagaatacctacacagccgagcggttcatctggctgacaaagctgaacaatctgaggatcctggagcagggaagcgagcgcccactgaccgacacagagagggccaccctgatggatgagccctaccgcaagtccaagctgacatatgcacaggcaaggaagctgctgggcctggaggacaccgccttctttaagggcctgagatacggcaaggataacgccgaggcctctacactgatggagatgaaggcctatcacgccatcagcagggccctggagaaggagggcctgaaggacaagaagtccccactgaatctgtctcccgagctgcaggatgagatcggcaccgcctttagcctgttcaagaccgacgaggatatcacaggcagactgaaggacaggatccagccagagatcctggaggccctgctgaagcacatcagctttgataagttcgtgcagatcagcctgaaggccctgcggaggatcgtgccactgatggagcagggcaagaggtacgacgaggcctgcgccgaaatctacggcgatcactatggcaagaagaacacagaggagaaaatctacctgccccctatccccgccgatgagatcaggaaccctgtggtgctgcgcgccctgtctcaggcaagaaaagtgatcaacggagtggtgcgccggtacggcagccccgccagaatccacatcgagacagccagggaagtgggcaagtcctttaaggacagaaaggagatcgagaagaggcaggaggagaacagaaaggatagggagaaggccgccgccaagttcagagagtactttcctaatttcgtgggcgagccaaagtccaaggatatcctgaagctgaggctgtacgagcagcagcacggcaagtgtctgtattctggcaaggagatcaacctgggccgcctgaatgagaagggctatgtggagatcgaccacgccctgcctttttctcggacctgggacgatagcttcaacaataaggtgctggtgctgggctctgagaaccagaataagggcaaccagacaccctacgagtatttcaacggcaaggacaatagccgcgagtggcaggagtttaaggcaagggtggagacaagcaggttccctcggtccaagaagcagagaatcctgctgcagaagtttgacgaggatggcttcaaggagaggaacctgaatgacacccgctacgtgaatcggtttctgtgccagttcgtggccgatagaatgaggctgaccggcaagggcaagaagagagtgtttgcctccaacggccagatcacaaatctgctgaggggcttctggggcctgagaaaggtgagggcagagaacgacaggcaccacgcactggatgcagtggtggtggcatgttctaccgtggccatgcagcagaagatcacacgctttgtgcggtataaggagatgaatgccttcgacggcaagaccatcgataaggagacaggcgaggtgctgcaccagaagacacactttcctcagccatgggagttctttgcccaggaagtgatgatccgggtgtttggcaagcctgacggcaagccagagttcgaggaggccgataccctggagaagctgagaacactgctggcagagaagctgagctccaggcccgaggcagtgcacgagtacgtgaccccactgttcgtgtctagagcccccaacaggaagatgagcggccagggccacatggagacagtgaagtccgccaagagactggacgagggcgtgtctgtgctgagggtgcctctgacacagctgaagctgaaggatctggagaagatggtgaatcgcgagcgggagccaaagctgtatgaggccctgaaggcaaggctggaggcacacaaggacgatcctgccaaggcctttgccgagccattctacaagtatgataaggccggcaacagaacccagcaggtgaaggccgtgagggtggagcaggtgcagaagacaggcgtgtgggtgcgcaaccacaatggcatcgccgacaatgctaccatggtgcgggtggacgtgtttgagaagggcgataagtactatctggtgcccatctacagctggcaggtggccaagggcatcctgcctgatagagccgtggtgcagggcaaggacgaggaggattggcagctgatcgacgattccttcaactttaagttctctctgcaccccaatgacctggtggaagtgatcaccaagaaggccaggatgtttggctacttcgcctcctgccaccgcggcacaggcaacatcaatatccggatccacgacctggatcacaagatcggcaagaacggcatcctggagggcatcggcgtgaagacagccctgagcttccagaagtatcagatcgacgagctgggcaaggagatcagaccttgtaggctgaagaagcgcccacccgtgcggtccgagtccgccacccccgagtccgtgtccggctggcggctgttcaagaagatctcctag

SEQ ID NO: 320 - RNA, 3420 nt, synthetic construct
  misc_feature 1..3420: note = Synthetic
  source 1..3420: mol_type = other RNA
atggacggctccggcggcggctcccccaagaagaagcggaaggtggaggacaagcggcccgccgccaccaagaaggccggccaggccaagaagaagaagggcggctccggcggcggcgccgccttcaagcccaactccatcaactacatcctgggcctggacatcggcatcgcctccgtgggctgggccatggtggagatcgacgaggaggagaaccccatccggctgatcgacctgggcgtgcgggtgttcgagcgggccgaggtgcccaagaccggcgactccctggccatggcccggcggctggcccggtccgtgcggcggctgacccggcggcgggcccaccggctgctgcggacccggcggctgctgaagcgggagggcgtgctgcaggccgccaacttcgacgagaacggcctgatcaagtccctgcccaacaccccctggcagctgcgggccgccgccctggaccggaagctgacccccctggagtggtccgccgtgctgctgcacctgatcaagcaccggggctacctgtcccagcggaagaacgagggcgagaccgccgacaaggagctgggcgccctgctgaagggcgtggccggcaacgcccacgccctgcagaccggcgacttccggacccccgccgagctggccctgaacaagttcgagaaggagtccggccacatccggaaccagcggtccgactactcccacaccttctcccggaaggacctgcaggccgagctgatcctgctgttcgagaagcagaaggagttcggcaacccccacgtgtccggcggcctgaaggagggcatcgagaccctgctgatgacccagcggcccgccctgtccggcgacgccgtgcagaagatgctgggccactgcaccttcgagcccgccgagcccaaggccgccaagaacacctacaccgccgagcggttcatctggctgaccaagctgaacaacctgcggatcctggagcagggctccgagcggcccctgaccgacaccgagcgggccaccctgatggacgagccctaccggaagtccaagctgacctacgcccaggcccggaagctgctgggcctggaggacaccgccttcttcaagggcctgcggtacggcaaggacaacgccgaggcctccaccctgatggagatgaaggcctaccacgccatctcccgggccctggagaaggagggcctgaaggacaagaagtcccccctgaacctgtcccccgagctgcaggacgagatcggcaccgccttctccctgttcaagaccgacgaggacatcaccggccggctgaaggaccggatccagcccgagatcctggaggccctgctgaagcacatctccttcgacaagttcgtgcagatctccctgaaggccctgcggcggatcgtgcccctgatggagcagggcaagcggtacgacgaggcctgcgccgagatctacggcgaccactacggcaagaagaacaccgaggagaagatctacctgccccccatccccgccgacgagatccggaaccccgtggtgctgcgggccctgtcccaggcccggaaggtgatcaacggcgtggtgcggcggtacggctcccccgcccggatccacatcgagaccgcccgggaggtgggcaagtccttcaaggaccggaaggagatcgagaagcggcaggaggagaaccggaaggaccgggagaaggccgccgccaagttccgggagtacttccccaacttcgtgggcgagcccaagtccaaggacatcctgaagctgcggctgtacgagcagcagcacggcaagtgcctgtactccggcaaggagatcaacctgggccggctgaacgagaagggctacgtggagatcgaccacgccctgcccttctcccggacctgggacgactccttcaacaacaaggtgctggtgctgggctccgagaaccagaacaagggcaaccagaccccctacgagtacttcaacggcaaggacaactcccgggagtggcaggagttcaaggcccgggtggagacctcccggttcccccggtccaagaagcagcggatcctgctgcagaagttcgacgaggacggcttcaaggagcggaacctgaacgacacccggtacgtgaaccggttcctgtgccagttcgtggccgaccggatgcggctgaccggcaagggcaagaagcgggtgttcgcctccaacggccagatcaccaacctgctgcggggcttctggggcctgcggaaggtgcgggccgagaacgaccggcaccacgccctggacgccgtggtggtggcctgctccaccgtggccatgcagcagaagatcacccggttcgtgcggtacaaggagatgaacgccttcgacggcaagaccatcgacaaggagaccggcgaggtgctgcaccagaagacccacttcccccagccctgggagttcttcgcccaggaggtgatgatccgggtgttcggcaagcccgacggcaagcccgagttcgaggaggccgacaccctggagaagctgcggaccctgctggccgagaagctgtcctcccggcccgaggccgtgcacgagtacgtgacccccctgttcgtgtcccgggcccccaaccggaagatgtccggccagggccacatggagaccgtgaagtccgccaagcggctggacgagggcgtgtccgtgctgcgggtgcccctgacccagctgaagctgaaggacctggagaagatggtgaaccgggagcgggagcccaagctgtacgaggccctgaaggcccggctggaggcccacaaggacgaccccgccaaggccttcgccgagcccttctacaagtacgacaaggccggcaaccggacccagcaggtgaaggccgtgcgggtggagcaggtgcagaagaccggcgtgtgggtgcggaaccacaacggcatcgccgacaacgccaccatggtgcgggtggacgtgttcgagaagggcgacaagtactacctggtgcccatctactcctggcaggtggccaagggcatcctgcccgaccgggccgtggtgcagggcaaggacgaggaggactggcagctgatcgacgactccttcaacttcaagttctccctgcaccccaacgacctggtggaggtgatcaccaagaaggcccggatgttcggctacttcgcctcctgccaccggggcaccggcaacatcaacatccggatccacgacctggaccacaagatcggcaagaacggcatcctggagggcatcggcgtgaagaccgccctgtccttccagaagtaccagatcgacgagctgggcaaggagatccggccctgccggctgaagaagcggccccccgtgcggtccgagtccgccacccccgagtccgtgtccggctggcggctgttcaagaagatctcctag

SEQ ID NO: 321 - RNA, 3414 nt, synthetic construct
  misc_feature 1..3414: note = Synthetic
  source 1..3414: mol_type = other RNA
atggacggctccggcggcggctcccccaagaagaagcggaaggtggaggacaagcggcccgccgccaccaagaaggccggccaggccaagaagaagaagggcggctccggcggcgccgccttcaagcccaaccccatcaactacatcctgggcctggacatcggcatcgcctccgtgggctgggccatggtggagatcgacgaggaggagaaccccatccggctgatcgacctgggcgtgcgggtgttcgagcgggccgaggtgcccaagaccggcgactccctggccatggcccggcggctggcccggtccgtgcggcggctgacccggcggcgggcccaccggctgctgcgggcccggcggctgctgaagcgggagggcgtgctgcaggccgccgacttcgacgagaacggcctgatcaagtccctgcccaacaccccctggcagctgcgggccgccgccctggaccggaagctgacccccctggagtggtccgccgtgctgctgcacctgatcaagcaccggggctacctgtcccagcggaagaacgagggcgagaccgccgacaaggagctgggcgccctgctgaagggcgtggccgacaacgcccacgccctgcagaccggcgacttccggacccccgccgagctggccctgaacaagttcgagaaggagtgcggccacatccggaaccagcggggcgactactcccacaccttctcccggaaggacctgcaggccgagctgaacctgctgttcgagaagcagaaggagttcggcaacccccacgtgtccggcggcctgaaggagggcatcgagaccctgctgatgacccagcggcccgccctgtccggcgacgccgtgcagaagatgctgggccactgcaccttcgagcccgccgagcccaaggccgccaagaacacctacaccgccgagcggttcatctggctgaccaagctgaacaacctgcggatcctggagcagggctccgagcggcccctgaccgacaccgagcgggccaccctgatggacgagccctaccggaagtccaagctgacctacgcccaggcccggaagctgctgtccctggaggacaccgccttcttcaagggcctgcggtacggcaaggacaacgccgaggcctccaccctgatggagatgaaggcctaccacaccatctcccgggccctggagaaggagggcctgaaggacaagaagtcccccctgaacctgtcccccgagctgcaggacgagatcggcaccgccttctccctgttcaagaccgacgaggacatcaccggccggctgaaggaccggatccagcccgagatcctggaggccctgctgaagcacatctccttcgacaagttcgtgcagatctccctgaaggccctgcggcggatcgtgcccctgatggagcagggcaagcggtacgacgaggcctgcgccgagatctacggcgaccactacggcaagaagaacaccgaggagaagatctacctgccccccatccccgccgacgagatccggaaccccgtggtgctgcgggccctgtcccaggcccggaaggtgatcaacggcgtggtgcggcggtacggctcccccgcccggatccacatcgagaccgcccgggaggtgggcaagtccttcaaggaccggaaggagatcgagaagcggcaggaggagaaccggaaggaccgggagaaggccgccgccaagttccgggagtacttccccaacttcgtgggcgagcccaagtccaaggacatcctgaagctgcggctgtacgagcagcagcacggcaagtgcctgtactccggcaaggagatcaacctgggccggctgaacgagaagggctacgtggagatcgaccacgccctgcccttctcccggacctgggacgactccttcaacaacaaggtgctggtgctgggctccgagaaccagaacaagggcaaccagaccccctacgagtacttcaacggcaaggacaactcccgggagtggcaggagttcaaggcccgggtggagacctcccggttcccccggtccaagaagcagcggatcctgctgcagaagttcgacgaggacggcttcaaggagcggaacctgaacgacacccggtacgtgaaccggttcctgtgccagttcgtggccgaccggatgcggctgaccggcaagggcaagaagcgggtgttcgcctccaacggccagatcaccaacctgctgcggggcttctggggcctgcggaaggtgcgggccgagaacgaccggcaccacgccctggacgccgtggtggtggcctgctccaccgtggccatgcagcagaagatcacccggttcgtgcggtacaaggagatgaacgccttcgacggcaagaccatcgacaaggagaccggcgaggtgctgcaccagaagacccacttcccccagccctgggagttcttcgcccaggaggtgatgatccgggtgttcggcaagcccgacggcaagcccgagttcgaggaggccgacacccccgagaagctgcggaccctgctggccgagaagctgtcctcccggcccgaggccgtgcacgagtacgtgacccccctgttcgtgtcccgggcccccaaccggaagatgtccggccagggccacatggagaccgtgaagtccgccaagcggctggacgagggcgtgtccgtgctgcgggtgcccctgacccagctgaagctgaaggacctggagaagatggtgaaccgggagcgggagcccaagctgtacgaggccctgaaggcccggctggaggcccacaaggacgaccccgccaaggccttcgccgagcccttctacaagtacgacaaggccggcaaccggacccagcaggtgaaggccgtgcgggtggagcaggtgcagaagaccggcgtgtgggtgcggaaccacaacggcatcgccgacaacgccaccatggtgcgggtggacgtgttcgagaagggcgacaagtactacctggtgcccatctactcctggcaggtggccaagggcatcctgcccgaccgggccgtggtggcctacgccgacgaggaggactggaccgtgatcgacgagtccttccggttcaagttcgtgctgtactccaacgacctgatcaaggtgcagctgaagaaggactccttcctgggctacttctccggcctggaccgggccaccggcgccatctccctgcgggagcacgacctggagaagtccaagggcaaggacggcatgcaccggatcggcgtgaagaccgccctgtccttccagaagtaccagatcgacgagatgggcaaggagatccggccctgccggctgaagaagcggccccccgtgcggtccgagtccgccacccccgagtccgtgtccggctggcggctgttcaagaagatctcctag

SEQ ID NO: 322-350 - skipped (29 entries)

SEQ ID NO: 351 - RNA, 101 nt, synthetic construct; identical to SEQ ID NO: 137
  misc_feature 1..101: note = Synthetic
  misc_feature 1..101: note = See specification as filed for detailed description of substitutions and modifications
  source 1..101: mol_type = other RNA

SEQ ID NO: 352 - RNA, 101 nt, synthetic construct; identical to SEQ ID NO: 137
  misc_feature 1..101: note = Synthetic
  misc_feature 1..101: note = See specification as filed for detailed description of substitutions and modifications
  source 1..101: mol_type = other RNA

SEQ ID NO: 353 - RNA, 101 nt, synthetic construct; identical to SEQ ID NO: 137
  misc_feature 1..101: note = Synthetic
  misc_feature 1..101: note = See specification as filed for detailed description of substitutions and modifications
  source 1..101: mol_type = other RNA

SEQ ID NO: 354 - RNA, 101 nt, synthetic construct; identical to SEQ ID NO: 137
  misc_feature 1..101: note = Synthetic
  misc_feature 1..101: note = See specification as filed for detailed description of substitutions and modifications
  source 1..101: mol_type = other RNA

SEQ ID NO: 355 - RNA, 101 nt, synthetic construct; identical to SEQ ID NO: 137
  modified_base 54: mod_base = OTHER; note = thymine
  misc_feature 1..101: note = Synthetic
  misc_feature 1..101: note = See specification as filed for detailed description of substitutions and modifications
  source 1..101: mol_type = other RNA

SEQ ID NO: 356 - RNA, 101 nt, synthetic construct; identical to SEQ ID NO: 137
  misc_feature 1..101: note = Synthetic
  misc_feature 1..101: note = See specification as filed for detailed description of substitutions and modifications
  source 1..101: mol_type = other RNA

SEQ ID NO: 357 - RNA, 101 nt, synthetic construct; identical to SEQ ID NO: 137
  misc_feature 1..101: note = Synthetic
  misc_feature 1..101: note = See specification as filed for detailed description of substitutions and modifications
  source 1..101: mol_type = other RNA

SEQ ID NO: 358 - RNA, 101 nt, synthetic construct; identical to SEQ ID NO: 137
  misc_feature 1..101: note = Synthetic
  misc_feature 1..101: note = See specification as filed for detailed description of substitutions and modifications
  source 1..101: mol_type = other RNA

SEQ ID NO: 359 - RNA, 101 nt, synthetic construct; identical to SEQ ID NO: 137
  misc_feature 1..101: note = Synthetic
  misc_feature 1..101: note = See specification as filed for detailed description of substitutions and modifications
  source 1..101: mol_type = other RNA

SEQ ID NO: 360 - RNA, 101 nt, synthetic construct; identical to SEQ ID NO: 137
  misc_feature 1..101: note = Synthetic
  misc_feature 1..101: note = See specification as filed for detailed description of substitutions and modifications
  source 1..101: mol_type = other RNA

SEQ ID NO: 361 - RNA, 101 nt, synthetic construct; identical to SEQ ID NO: 137
  misc_feature 1..101: note = Synthetic
  misc_feature 1..101: note = See specification as filed for detailed description of substitutions and modifications
  source 1..101: mol_type = other RNA

SEQ ID NO: 362 - RNA, 101 nt, synthetic construct; identical to SEQ ID NO: 137
  misc_feature 1..101: note = Synthetic
  misc_feature 1..101: note = See specification as filed for detailed description of substitutions and modifications
  source 1..101: mol_type = other RNA

SEQ ID NO: 363 - RNA, 101 nt, synthetic construct; identical to SEQ ID NO: 137
  misc_feature 1..101: note = Synthetic
  misc_feature 1..101: note = See specification as filed for detailed description of substitutions and modifications
  source 1..101: mol_type = other RNA

SEQ ID NO: 364 - RNA, 101 nt, synthetic construct; identical to SEQ ID NO: 137
  misc_feature 1..101: note = Synthetic
  misc_feature 1..101: note = See specification as filed for detailed description of substitutions and modifications
  source 1..101: mol_type = other RNA

SEQ ID NO: 365 - RNA, 101 nt, synthetic construct; identical to SEQ ID NO: 137
  misc_feature 1..101: note = Synthetic
  misc_feature 1..101: note = See specification as filed for detailed description of substitutions and modifications
  source 1..101: mol_type = other RNA

SEQ ID NO: 366 - RNA, 101 nt, synthetic construct; identical to SEQ ID NO: 137
  misc_feature 1..101: note = Synthetic
  misc_feature 1..101: note = See specification as filed for detailed description of substitutions and modifications
  source 1..101: mol_type = other RNA

SEQ ID NO: 367-382 - skipped (16 entries)

SEQ ID NO: 383 - protein, 8 aa, synthetic construct
  REGION 1..8: note = Synthetic
PKKKRKVE

SEQ ID NO: 384 - protein, 7 aa, synthetic construct
  REGION 1..7: note = Synthetic
KKKRKVE

SEQ ID NO: 385 - protein, 19 aa, synthetic construct
  REGION 1..19: note = Synthetic
KRTADGSEFESPKKKRKVE

SEQ ID NO: 386 - protein, 9 aa, synthetic construct
  REGION 1..9: note = Synthetic
PAAKKKKLD

SEQ ID NO: 387 - DNA, 21 bp, synthetic construct
  misc_feature 1..21: note = Synthetic
  source 1..21: mol_type = other DNA
cccaagaagaagaggaaagtc

SEQ ID NO: 388 - protein, 7 aa, synthetic construct
  REGION 1..7: note = Synthetic
PKKKRKV

SEQ ID NO: 389 - DNA, 233 bp, synthetic construct
  misc_feature 1..233: note = Synthetic
  source 1..233: mol_type = other DNA
tttcccatgattccttcatatttgcatatacgatacaaggctgttagagagataattggaattaatttgactgtaaacacaaagatattagtacaaaatacgtgacgtagaaagtaataatttcttgggtagtttgcagttttaaaattatgttttaaaatggactatcatatgcttaccgtaacttgaaagtatttcgatttcttggctttatatatcttgtggaaaggacg

SEQ ID NO: 390 - DNA, 588 bp, synthetic construct
  misc_feature 1..588: note = Synthetic
  source 1..588: mol_type = other DNA
atagtaatcaattacggggtcattagttcatagcccatatatggagttccgcgttacataacttacggtaaatggcccgcctggctgaccgcccaacgacccccgcccattgacgtcaataatgacgtatgttcccatagtaacgccaatagggactttccattgacgtcaatgggtggagtatttacggtaaactgcccacttggcagtacatcaagtgtatcatatgccaagtccgccccctattgacgtcaatgacggtaaatggcccgcctggcattatgcccagtacatgaccttacgggactttcctacttggcagtacatctacgtattagtcatcgctattaccatggtgatgcggttttggcagtacaccaatgggcgtggatagcggtttgactcacggggatttccaagtctccaccccattgacgtcaatgggagtttgttttggcaccaaaatcaacgggactttccaaaatgtcgtaacaactgcgatcgcccgccccgttgacgcaaatgggcggtaggcgtgtacggtgggaggtctatataagcagagctcgtttagtgaaccgtcagatc

SEQ ID NO: 391 - DNA, 50 bp, synthetic construct
  misc_feature 1..50: note = Synthetic
  source 1..50: mol_type = other DNA
acatttgcttctgacacaactgtgttcactagcaacctcaaacagacacc

SEQ ID NO: 392 - DNA, 66 bp, synthetic construct
  misc_feature 1..66: note = Synthetic
  source 1..66: mol_type = other DNA
cataaaccctggcgcgctcgcggcccggcactcttctggtccccacagactcagagagaacccacc

SEQ ID NO: 393 - DNA, 29 bp, synthetic construct
  misc_feature 1..29: note = Synthetic
  source 1..29: mol_type = other DNA
aagctcagaataaacgctcaactttggcc

SEQ ID NO: 394 - DNA, 27 bp, synthetic construct
  misc_feature 1..27: note = Synthetic
  source 1..27: mol_type = other DNA
cagggtcctgtggacagctcaccagct

SEQ ID NO: 395 - DNA, 61 bp, synthetic construct
  misc_feature 1..61: note = Synthetic
  source 1..61: mol_type = other DNA
tcccgcagtcggcgtccagcggctctgcttgttcgtgtgtgtgtcgttgcaggccttattc

SEQ ID NO: 396 - DNA, 42 bp, synthetic construct
  misc_feature 1..42: note = Synthetic
  source 1..42: mol_type = other DNA
cagatcgcctggagacgccatccacgctgttttgacctccat

SEQ ID NO: 397 - DNA, 42 bp, synthetic construct
  misc_feature 1..42: note = Synthetic
  source 1..42: mol_type = other DNA
agaagacaccgggaccgatccagcctccgcggccgggaacgg

SEQ ID NO: 398 - DNA, 42 bp, synthetic construct
  misc_feature 1..42: note = Synthetic
  source 1..42: mol_type = other DNA
tgcattggaacgcggattccccgtgccaagagtgactcaccg

SEQ ID NO: 399 - DNA, 132 bp, synthetic construct
  misc_feature 1..132: note = Synthetic
  source 1..132: mol_type = other DNA
gctcgctttcttgctgtccaatttctattaaaggttcctttgttccctaagtccaactactaaactgggggatattatgaagggccttgagcatctggattctgcctaataaaaaacatttattttcattgc

SEQ ID NO: 400 - DNA, 110 bp, synthetic construct
  misc_feature 1..110: note = Synthetic
  source 1..110: mol_type = other DNA
gctggagcctcggtggccatgcttcttgccccttgggcctccccccagcccctcctccccttcctgcacccgtacccccgtggtctttgaataaagtctgagtgggcggc

SEQ ID NO: 401 - DNA, 130 bp, synthetic construct
  misc_feature 1..130: note = Synthetic
  source 1..130: mol_type = other DNA
accagcctcaagaacacccgaatggagtctctaagctacataataccaacttacactttacaaaatgttgtcccccaaaatgtagccattcgtatctgctcctaataaaaagaaagtttcttcacattct

SEQ ID NO: 402 - DNA, 102 bp, synthetic construct
  misc_feature 1..102: note = Synthetic
  source 1..102: mol_type = other DNA
ttgccagccatctgttgtttgcccctcccccgtgccttccttgaccctggaaggtgccactcccactgtcctttcctaataaaatgaggaaattgcatcgca

SEQ ID NO: 403 - DNA, 93 bp, synthetic construct
  misc_feature 1..93: note = Synthetic
  source 1..93: mol_type = other DNA
gctgccttctgcggggcttgccttctggccatgcccttcttctctcccttgcacctgtacctcttggtctttgaataaagcctgagtaggaag

SEQ ID NO: 404 - DNA, 278 bp, synthetic construct
  misc_feature 1..278: note = Synthetic
  source 1..278: mol_type = other DNA
ctggtactgcatgcacgcaatgctagctgcccctttcccgtcctgggtaccccgagtctcccccgacctcgggtcccaggtatgctcccacctccacctgccccactcaccacctctgctagttccagacacctcccaagcacgcagcaatgcagctcaaaacgcttagcctagccacacccccacgggaaacagcagtgattaacctttagcaataaacgaaagtttaactaagctatactaaccccagggttggtcaatttcgtgccagccacacc

SEQ ID NO: 405 - DNA, 278 bp, synthetic construct
  misc_feature 1..278: note = Synthetic
  source 1..278: mol_type = other DNA
caagcacgcagcaatgcagctcaaaacgcttagcctagccacacccccacgggaaacagcagtgattaacctttagcaataaacgaaagtttaactaagctatactaaccccagggttggtcaatttcgtgccagccacaccctggtactgcatgcacgcaatgctagctgcccctttcccgtcctgggtaccccgagtctcccccgacctcgggtcccaggtatgctcccacctccacctgccccactcaccacctctgctagttccagacacctcc

SEQ ID NO: 406 - DNA, 260 bp, synthetic construct
  misc_feature 1..260: note = Synthetic
  source 1..260: mol_type = other DNA
accagcctcaagaacacccgaatggagtctctaagctacataataccaacttacactttacaaaatgttgtcccccaaaatgtagccattcgtatctgctcctaataaaaagaaagtttcttcacattctaccagcctcaagaacacccgaatggagtctctaagctacataataccaacttacactttacaaaatgttgtcccccaaaatgtagccattcgtatctgctcctaataaaaagaaagtttcttcacattct

SEQ ID NO: 407 - RNA, 10 nt, synthetic construct
  misc_feature 1..10: note = Synthetic
  source 1..10: mol_type = other RNA
gccrccatgg

SEQ ID NO: 408 - RNA, 13 nt, synthetic construct
  misc_feature 1..13: note = Synthetic
  source 1..13: mol_type = other RNA
gccgccrccatgg

SEQ ID NO: 409 - DNA, 105 bp, synthetic construct
  misc_feature 1..105: note = Synthetic
  source 1..105: mol_type = other DNA
aaaaaaaaaaaaaaaaaaaaaaaaaaaaaagcgaaaaaaaaaaaaaaaaaaaaaaaaaaaaaaccgaaaaaaaaaaaaaaaaaaaaaaaaaaaaaaaaaaaaaaa

SEQ ID NO: 410 - protein, 9 aa, synthetic construct
  REGION 1..9: note = Synthetic
LAAKRSRTT

SEQ ID NO: 411 - protein, 9 aa, synthetic construct
  REGION 1..9: note = Synthetic
QAAKRSRTT

SEQ ID NO: 412 - protein, 10 aa, synthetic construct
  REGION 1..10: note = Synthetic
PAPAKRERTT

SEQ ID NO: 413 - protein, 9 aa, synthetic construct
  REGION 1..9: note = Synthetic
QAAKRPRTT

SEQ ID NO: 414 - protein, 9 aa, synthetic construct
  REGION 1..9: note = Synthetic
RAAKRPRTT

SEQ ID NO: 415 - protein, 11 aa, synthetic construct
  REGION 1..11: note = Synthetic
AAAKRSWSMAA

SEQ ID NO: 416 - protein, 11 aa, synthetic construct
  REGION 1..11: note = Synthetic
AAAKRVWSMAF

SEQ ID NO: 417 - protein, 11 aa, synthetic construct
  REGION 1..11: note = Synthetic
AAAKRSWSMAF

SEQ ID NO: 418 - protein, 10 aa, synthetic construct
  REGION 1..10: note = Synthetic
AAAKRKYFAA

SEQ ID NO: 419 - protein, 10 aa, synthetic construct
  REGION 1..10: note = Synthetic
RAAKRKAFAA

SEQ ID NO: 420 - protein, 10 aa, synthetic construct
  REGION 1..10: note = Synthetic
RAAKRKYFAV

SEQ ID NO: 421 - protein, 7 aa, synthetic construct
  REGION 1..7: note = Synthetic
PKKKRRV

SEQ ID NO: 422 - protein, 16 aa, synthetic construct
  REGION 1..16: note = Synthetic
KRPAATKKAGQAKKKK

SEQ ID NO: 423 - DNA, 21 bp, synthetic construct
  misc_feature 1..21: note = Synthetic
  source 1..21: mol_type = other DNA
ccgaagaagaagagaaaggtc

SEQ ID NO: 424 - DNA, 27 bp, synthetic construct
  misc_feature 1..27: note = Synthetic
  source 1..27: mol_type = other DNA
ctggcagcaaagagaagcagaacaaca

SEQ ID NO: 425 - DNA, 27 bp, synthetic construct
  misc_feature 1..27: note = Synthetic
  source 1..27: mol_type = other DNA
caggcagcaaagagaagcagaacaaca

SEQ ID NO: 426 - DNA, 30 bp, synthetic construct
  misc_feature 1..30: note = Synthetic
  source 1..30: mol_type = other DNA
ccggcaccggcaaagagagaaagaacaaca

SEQ ID NO: 427 - DNA, 27 bp, synthetic construct
  misc_feature 1..27: note = Synthetic
  source 1..27: mol_type = other DNA
caggcagcaaagagaccgagaacaaca

SEQ ID NO: 428 - DNA, 27 bp, synthetic construct
  misc_feature 1..27: note = Synthetic
  source 1..27: mol_type = other DNA
agagcagcaaagagaccgagaacaaca

SEQ ID NO: 429 - DNA, 33 bp, synthetic construct
  misc_feature 1..33: note = Synthetic
  source 1..33: mol_type = other DNA
gcagcagcaaagagaagctggagcatggcagca

SEQ ID NO: 430 - DNA, 33 bp, synthetic construct
  misc_feature 1..33: note = Synthetic
  source 1..33: mol_type = other DNA
gcagcagcaaagagagtctggagcatggcattc

SEQ ID NO: 431 - DNA, 33 bp, synthetic construct
  misc_feature 1..33: note = Synthetic
  source 1..33: mol_type = other DNA
gcagcagcaaagagaagctggagcatggcattc

SEQ ID NO: 432 - DNA, 30 bp, synthetic construct
  misc_feature 1..30: note = Synthetic
  source 1..30: mol_type = other DNA
gcagcagcaaagagaaagtacttcgcagca

SEQ ID NO: 433 - DNA, 30 bp, synthetic construct
  misc_feature 1..30: note = Synthetic
  source 1..30: mol_type = other DNA
agagcagcaaagagaaaggcattcgcagca

SEQ ID NO: 434 - DNA, 30 bp, synthetic construct
  misc_feature 1..30: note = Synthetic
  source 1..30: mol_type = other DNA
agagcagcaaagagaaagtacttcgcagtc

SEQ ID NO: 435 - DNA, 21 bp, synthetic construct
  misc_feature 1..21: note = Synthetic
  source 1..21: mol_type = other DNA
ccgaagaagaagagaagagtc

SEQ ID NO: 436 - RNA, 89 nt, synthetic construct
  misc_feature 1..89: note = Synthetic
  misc_feature 1..89: note = See specification as filed for detailed description of substitutions and modifications
  source 1..89: mol_type = other RNA
caagtctgtctgcctattcaccgagttgtagctccctccgttgctacaataaggccgtcgatgtgccgcaacgctctgccggcatcgtt

SEQ ID NO: 437 - RNA, 89 nt, synthetic construct
  misc_feature 1..89: note = Synthetic
  misc_feature 1..89: note = See specification as filed for detailed description of substitutions and modifications
  source 1..89: mol_type = other RNA
ggtgaataggcagacagacttgtcgttgtagctccctccgttgctacaataaggccgtcgatgtgccgcaacgctctgccggcatcgtt

SEQ ID NO: 438 - RNA, 89 nt, synthetic construct
  misc_feature 1..89: note = Synthetic
  misc_feature 1..89: note = See specification as filed for detailed description of substitutions and modifications
  source 1..89: mol_type = other RNA
gattaaacccggccactttcaggagttgtagctccctccgttgctacaataaggccgtcgatgtgccgcaacgctctgccggcatcgtt

SEQ ID NO: 439 - RNA, 89 nt, synthetic construct
  misc_feature 1..89: note = Synthetic
  misc_feature 1..89: note = See specification as filed for detailed description of substitutions and modifications
  source 1..89: mol_type = other RNA
cagtgacaagtctgtctgcctattgttgtagctccctccgttgctacaataaggccgtcgatgtgccgcaacgctctgccggcatcgtt

SEQ ID NO: 440 - RNA, 89 nt, synthetic construct
  misc_feature 1..89: note = Synthetic
  misc_feature 1..89: note = See specification as filed for detailed description of substitutions and modifications
  source 1..89: mol_type = other RNA
gttgaaggcgtttgcacatgcaaagttgtagctccctccgttgctacaataaggccgtcgatgtgccgcaacgctctgccggcatcgtt

SEQ ID NO: 441 - RNA, 89 nt, synthetic construct
  misc_feature 1..89: note = Synthetic
  misc_feature 1..89: note = See specification as filed for detailed description of substitutions and modifications
  source 1..89: mol_type = other RNA
tcctgtgatgtcaagctggtcgaggttgtagctccctccgttgctacaataaggccgtcgatgtgccgcaacgctctgccggcatcgtt

SEQ ID NO: 442 - RNA, 89 nt, synthetic construct
  misc_feature 1..89: note = Synthetic
  misc_feature 1..89: note = See specification as filed for detailed description of substitutions and modifications
  source 1..89: mol_type = other RNA
caggttttgaaagtttaggttcgtgttgtagctccctccgttgctacaataaggccgtcgatgtgccgcaacgctctgccggcatcgtt

SEQ ID NO: 443 - RNA, 89 nt, synthetic construct
  misc_feature 1..89: note = Synthetic
  misc_feature 1..89: note = See specification as filed for detailed description of substitutions and modifications
  source 1..89: mol_type = other RNA
atcagaatccttactttgtgacacgttgtagctccctccgttgctacaataaggccgtcgatgtgccgcaacgctctgccggcatcgtt

SEQ ID NO: 444 - RNA, 89 nt, synthetic construct
  misc_feature 1..89: note = Synthetic
  misc_feature 1..89: note = See specification as filed for detailed description of substitutions and modifications
  source 1..89: mol_type = other RNA
gaagtccatagacctcatgtctaggttgtagctccctccgttgctacaataaggccgtcgatgtgccgcaacgctctgccggcatcgtt

SEQ ID NO: 445 - RNA, 101 nt, synthetic construct
  misc_feature 1..101: note = Synthetic
  misc_feature 1..101: note = See specification as filed for detailed description of substitutions and modifications
  source 1..101: mol_type = other RNA
tgtctgcctattcaccgattttgagttgtagctccctgaaaccgttgctacaataaggccgtcgaaagatgtgccgcaacgctctgccttctggcatcgtt

SEQ ID NO: 446 - RNA, 101 nt, synthetic construct
  misc_feature 1..101: note = Synthetic
  misc_feature 1..101: note = See specification as filed for detailed description of substitutions and modifications
  source 1..101: mol_type = other RNA
tgcctattcaccgattttgattctgttgtagctccctgaaaccgttgctacaataaggccgtcgaaagatgtgccgcaacgctctgccttctggcatcgtt

SEQ ID NO: 447 - RNA, 101 nt, synthetic construct
  misc_feature 1..101: note = Synthetic
  misc_feature 1..101: note = See specification as filed for detailed description of substitutions and modifications
  source 1..101: mol_type = other RNA
cgattttgattctcaaacaaatgtgttgtagctccctgaaaccgttgctacaataaggccgtcgaaagatgtgccgcaacgctctgccttctggcatcgtt

SEQ ID NO: 448 - RNA, 101 nt, synthetic construct
  misc_feature 1..101: note = Synthetic
  misc_feature 1..101: note = See specification as filed for detailed description of substitutions and modifications
  source 1..101: mol_type = other RNA
gtaaggattctgatgtgtatatcagttgtagctccctgaaaccgttgctacaataaggccgtcgaaagatgtgccgcaacgctctgccttctggcatcgtt

SEQ ID NO: 449 - RNA, 101 nt, synthetic construct
  misc_feature 1..101: note = Synthetic
  misc_feature 1..101: note = See specification as filed for detailed description of substitutions and modifications
  source 1..101: mol_type = other RNA
agagcaacagtgctgtggcctggagttgtagctccctgaaaccgttgctacaataaggccgtcgaaagatgtgccgcaacgctctgccttctggcatcgtt

SEQ ID NO: 450 - RNA, 101 nt, synthetic construct
  misc_feature 1..101: note = Synthetic
  misc_feature 1..101: note = See specification as filed for detailed description of substitutions and modifications
  source 1..101: mol_type = other RNA
tggagcaacaaatctgactttgcagttgtagctccctgaaaccgttgctacaataaggccgtcgaaagatgtgccgcaacgctctgccttctggcatcgtt

SEQ ID NO: 451 - RNA, 101 nt, synthetic construct
  misc_feature 1..101: note = Synthetic
  misc_feature 1..101: note = See specification as filed for detailed description of substitutions and modifications
  source 1..101: mol_type = other RNA
atgctgttgttgaaggcgtttgcagttgtagctccctgaaaccgttgctacaataaggccgtcgaaagatgtgccgcaacgctctgccttctggcatcgtt

SEQ ID NO: 452 - RNA, 101 nt, synthetic construct
  misc_feature 1..101: note = Synthetic
  misc_feature 1..101: note = See specification as filed for detailed description of substitutions and modifications
  source 1..101: mol_type = other RNA
ttttgaaagtttaggttcgtatctgttgtagctccctgaaaccgttgctacaataaggccgtcgaaagatgtgccgcaacgctctgccttctggcatcgtt

SEQ ID NO: 453 - RNA, 101 nt, synthetic construct
  misc_feature 1..101: note = Synthetic
  misc_feature 1..101: note = See specification as filed for detailed description of substitutions and modifications
  source 1..101: mol_type = other RNA
ttactttgtgacacatttgtttgagttgtagctccctgaaaccgttgctacaataaggccgtcgaaagatgtgccgcaacgctctgccttctggcatcgtt

SEQ ID NO: 454 - RNA, 101 nt, synthetic construct
  misc_feature 1..101: note = Synthetic
  misc_feature 1..101: note = See specification as filed for detailed description of substitutions and modifications
  source 1..101: mol_type = other RNA
gattaaacccggccactttcaggagttgtagctccctgaaaccgttgctacaataaggccgtcgaaagatgtgccgcaacgctctgccttctggcatcgtt

SEQ ID NO: 455 - RNA, 101 nt, synthetic construct
  misc_feature 1..101: note = Synthetic
  misc_feature 1..101: note = See specification as filed for detailed description of substitutions and modifications
  source 1..101: mol_type = other RNA
atatccagaaccctgaccctgccggttgtagctccctgaaaccgttgctacaataaggccgtcgaaagatgtgccgcaacgctctgccttctggcatcgtt

SEQ ID NO: 456 - RNA, 101 nt, synthetic construct
  misc_feature 1..101: note = Synthetic
  misc_feature 1..101: note = See specification as filed for detailed description of substitutions and modifications
  source 1..101: mol_type = other RNA
aggaccagcctcagacacaaatacgttgtagctccctgaaaccgttgctacaataaggccgtcgaaagatgtgccgcaacgctctgccttctggcatcgtt

SEQ ID NO: 457 - RNA, 101 nt, synthetic construct
  misc_feature 1..101: note = Synthetic
  misc_feature 1..101: note = See specification as filed for detailed description of substitutions and modifications
  source 1..101: mol_type = other RNA
ctgcctcggacggcatctagaactgttgtagctccctgaaaccgttgctacaataaggccgtcgaaagatgtgccgcaacgctctgccttctggcatcgtt

SEQ ID NO: 458 - RNA, 101 nt, synthetic construct
  misc_feature 1..101: note = Synthetic
  misc_feature 1..101: note = See specification as filed for detailed description of substitutions and modifications
  source 1..101: mol_type = other RNA
aggcagaggaggagcagacgatgagttgtagctccctgaaaccgttgctacaataaggccgtcgaaagatgtgccgcaacgctctgccttctggcatcgtt

SEQ ID NO: 459-499 - skipped (41 entries)

SEQ ID NO: 500 - RNA, 145 nt, synthetic construct
  misc_feature 1..145: note = Synthetic
  source 1..145: mol_type = other RNA
nnnnnnnnnnnnnnnnnnnnnnnngttgtagctccctttctcatttcggaaacgaaatgagaaccgttgctacaataaggccgtctgaaaagatgtgccgcaacgctctgccccttaaagcttctgctttaaggggcatcgttta

SEQ ID NO: 501 - RNA, 102 nt, synthetic construct
  misc_feature 1..102: note = Synthetic
  misc_difference 21..25: note = up to 5 may be deleted
  source 1..102: mol_type = other RNA
nnnnnnnnnnnnnnnnnnnnnnnnngttgtagctccctgaaaccgttgctacaataaggccgtcgaaagatgtgccgcaacgctctgccttctggcatcgtt

SEQ ID NO: 502 - RNA, 106 nt, synthetic construct
  misc_feature 1..106: note = Synthetic
  misc_difference 21..25: note = up to 5 may be deleted
  source 1..106: mol_type = other RNA
nnnnnnnnnnnnnnnnnnnnnnnnngttgtagctccctgaaaccgttgctacaataaggccgtcgaaagatgtgccgcaacgctctgccttctggcatcgtttatt

SEQ ID NO: 503 - RNA, 108 nt, synthetic construct
  misc_feature 1..108: note = Synthetic
  misc_difference 21..25: note = up to 5 may be deleted
  source 1..108: mol_type = other RNA
nnnnnnnnnnnnnnnnnnnnnnnnngttgtagctccctggaaacccgttgctacaataaggccgtcgaaagatgtgccgcaacgctctgccttctggcatcgtttatt

SEQ ID NO: 504 - RNA, 77 nt, synthetic construct
  misc_feature 1..77: note = Synthetic
  misc_feature 1..77: note = See specification as filed for detailed description of substitutions and modifications
  source 1..77: mol_type = other RNA
gttgtagctccctgaaaccgttgctacaataaggccgtcgaaagatgtgccgcaacgctctgccttctggcatcgtt

SEQ ID NO: 505 - RNA, 77 nt, synthetic construct; identical to SEQ ID NO: 504
  misc_feature 1..77: note = Synthetic
  misc_feature 1..77: note = See specification as filed for detailed description of substitutions and modifications
  source 1..77: mol_type = other RNA

SEQ ID NO: 506 - RNA, 94 nt, synthetic construct
  misc_feature 1..94: note = Synthetic
  misc_difference 21..25: note = up to 5 may be deleted
  source 1..94: mol_type = other RNA
nnnnnnnnnnnnnnnnnnnnnnnnngttgtagctcccttcgaccgttgctacaataaggccgtcgatgtgccgcaacgctctgccggcatcgtt

SEQ ID NO: 507 - RNA, 93 nt, synthetic construct
  misc_feature 1..93: note = Synthetic
  misc_feature 1..93: note = See specification as filed for detailed description of substitutions and modifications
  source 1..93: mol_type = other RNA
nnnnnnnnnnnnnnnnnnnnnnnngttgtagctcccttcgaccgttgctacaataaggccgtcgatgtgccgcaacgctctgccggcatcgtt

SEQ ID NO: 508 - RNA, 101 nt, synthetic construct
  misc_feature 1..101: note = Synthetic
  misc_feature 1..101: note = See specification as filed for detailed description of substitutions and modifications
  source 1..101: mol_type = other RNA
nnnnnnnnnnnnnnnnnnnnnnnngttgtagctccctgaaaccgttgctacaataaggccgtcgaaagatgtgccgcaacgctctgccttctggcatcgtt

SEQ ID NO: 509 - RNA, 101 nt, synthetic construct; identical to SEQ ID NO: 456
  misc_feature 1..101: note = Synthetic
  source 1..101: mol_type = other RNA

SEQ ID NO: 510 - RNA, 101 nt, synthetic construct; identical to SEQ ID NO: 457
  misc_feature 1..101: note = Synthetic
  source 1..101: mol_type = other RNA

SEQ ID NO: 511 - RNA, 101 nt, synthetic construct; identical to SEQ ID NO: 458
  misc_feature 1..101: note = Synthetic
  source 1..101: mol_type = other RNA

SEQ ID NO: 512 - RNA, 101 nt, synthetic construct; identical to SEQ ID NO: 508
  misc_feature 1..101: note = Synthetic
  misc_feature 1..101: note = See specification as filed for detailed description of substitutions and modifications
  source 1..101: mol_type = other RNA

SEQ ID NO: 513 - RNA, 81 nt, synthetic construct
  misc_feature 1..81: note = Synthetic
  source 1..81: mol_type = other RNA
gttgtagctcccttcgaaagaccgttgctacaataaggccgtcgaaagatgtgccgcaacgctctgccttctggcatcgtt

SEQ ID NO: 514 - RNA, 106 nt, synthetic construct
  misc_feature 1..106: note = Synthetic
  misc_difference 21..25: note = up to 5 may be deleted
  source 1..106: mol_type = other RNA
nnnnnnnnnnnnnnnnnnnnnnnnngttgtagctcccttcgaaagaccgttgctacaataaggccgtcgaaagatgtgccgcaacgctctgccttctggcatcgtt

SEQ ID NO: 515 - RNA, 81 nt, synthetic construct; identical to SEQ ID NO: 513
  misc_feature 1..81: note = Synthetic
  misc_feature 1..81: note = See specification as filed for detailed description of substitutions and modifications
  source 1..81: mol_type = other RNA

SEQ ID NO: 516 - RNA, 105 nt, synthetic construct
  misc_feature 1..105: note = Synthetic
  misc_feature 1..105: note = See specification as filed for detailed description of substitutions and modifications
  source 1..105: mol_type = other RNA
nnnnnnnnnnnnnnnnnnnnnnnngttgtagctcccttcgaaagaccgttgctacaataaggccgtcgaaagatgtgccgcaacgctctgccttctggcatcgtt

SEQ ID NO: 517 - RNA, 101 nt, synthetic construct; identical to SEQ ID NO: 508
  misc_feature 1..101: note = Synthetic
  misc_feature 1..101: note = See specification as filed for detailed description of substitutions and modifications
  source 1..101: mol_type = other RNA

SEQ ID NO: 518 - RNA, 101 nt, synthetic construct; identical to SEQ ID NO: 508
  misc_feature 1..101: note = Synthetic
  misc_feature 1..101: note = See specification as filed for detailed description of substitutions and modifications
  source 1..101: mol_type = other RNA

SEQ ID NO: 519 - RNA, 101 nt, synthetic construct; identical to SEQ ID NO: 508
  misc_feature 1..101: note = Synthetic
  misc_feature 1..101: note = See specification as filed for detailed description of substitutions and modifications
  source 1..101: mol_type = other RNA

SEQ ID NO: 520 - RNA, 105 nt, synthetic construct; identical to SEQ ID NO: 516
  misc_feature 1..105: note = Synthetic
  misc_feature 1..105: note = See specification as filed for detailed description of substitutions and modifications
  source 1..105: mol_type = other RNA

SEQ ID NO: 521 - RNA, 105 nt, synthetic construct; identical to SEQ ID NO: 516
  misc_feature 1..105: note = Synthetic
  misc_feature 1..105: note = See specification as filed for detailed description of substitutions and modifications
  source 1..105: mol_type = other RNA

SEQ ID NO: 522 - RNA, 105 nt, synthetic construct; identical to SEQ ID NO: 516
  misc_feature 1..105: note = Synthetic
  misc_feature 1..105: note = See specification as filed for detailed description of substitutions and modifications
  source 1..105: mol_type = other RNA

SEQ ID NO: 523 - RNA, 102 nt, synthetic construct; identical to SEQ ID NO: 501
  misc_feature 1..102: note = Synthetic
  misc_feature 1..102: note = See specification as filed for detailed description of substitutions and modifications
  misc_difference 21..25: note = up to 5 may be deleted
  source 1..102: mol_type = other RNA

SEQ ID NO: 524 - RNA, 106 nt, synthetic construct; identical to SEQ ID NO: 514
  misc_feature 1..106: note = Synthetic
  misc_feature 1..106: note = See specification as filed for detailed description of substitutions and modifications
  misc_difference 21..25: note = up to 5 may be deleted
  source 1..106: mol_type = other RNA

SEQ ID NO: 525 - RNA, 101 nt, synthetic construct; identical to SEQ ID NO: 508
  misc_feature 1..101: note = Synthetic
  misc_feature 1..101: note = See specification as filed for detailed description of substitutions and modifications
  source 1..101: mol_type = other RNA

SEQ ID NO: 526 - RNA, 101 nt, synthetic construct; identical to SEQ ID NO: 508
  misc_feature 1..101: note = Synthetic
  misc_feature 1..101: note = See specification as filed for detailed description of substitutions and modifications
  source 1..101: mol_type = other RNA

SEQ ID NO: 527 - RNA, 101 nt, synthetic construct; identical to SEQ ID NO: 508
  misc_feature 1..101: note = Synthetic
  misc_feature 1..101: note = See specification as filed for detailed description of substitutions and modifications
  source 1..101: mol_type = other RNA

SEQ ID NO: 528 - RNA, 101 nt, synthetic construct; identical to SEQ ID NO: 137
  misc_feature 1..101: note = Synthetic
  misc_feature 1..101: note = See specification as filed for detailed description of substitutions and modifications
  source 1..101: mol_type = other RNA

SEQ ID NO: 529 - RNA, 105 nt, synthetic construct
  misc_feature 1..105: note = Synthetic
  misc_feature 1..105: note = See specification as filed for detailed description of substitutions and modifications
  source 1..105: mol_type = other RNA
ccaagtgtcttccagtacgatttggttgtagctcccttcgaaagaccgttgctacaataaggccgtcgaaagatgtgccgcaacgctctgccttctggcatcgtt

SEQ ID NO: 530 - RNA, 101 nt, synthetic construct
  misc_feature 1..101: note = Synthetic
  misc_feature 1..101: note = See specification as filed for detailed description of substitutions and modifications
  source 1..101: mol_type = other RNA
gtgtgtccctctccccacccgtccgttgtagctccctgaaaccgttgctacaataaggccgtcgaaagatgtgccgcaacgctctgccttctggcatcgtt

SEQ ID NO: 531 - RNA, 105 nt, synthetic construct; identical to SEQ ID NO: 529
  misc_feature 1..105: note = Synthetic
  misc_feature 1..105: note = See specification as filed for detailed description of substitutions and modifications
  source 1..105: mol_type = other RNA

SEQ ID NO: 532 - RNA, 103 nt, synthetic construct
  misc_feature 1..103: note = Synthetic
  misc_feature 1..103: note = See specification as filed for detailed description of substitutions and modifications
  source 1..103: mol_type = other RNA
ccaagtgtcttccagtacgatttggttgtagctcccttcgaaagaccgttgctacaataaggccgtgaaaatgtgccgcaacgctctgccttctggcatcgtt

SEQ ID NO: 533 - RNA, 101 nt, synthetic construct
  misc_feature 1..101: note = Synthetic
  misc_feature 1..101: note = See specification as filed for detailed description of substitutions and modifications
  source 1..101: mol_type = other RNA
ccaagtgtcttccagtacgatttggttgtagctcccttcgaaagaccgttgctacaataaggccggaaatgtgccgcaacgctctgccttctggcatcgtt

SEQ ID NO: 534 - RNA, 99 nt, synthetic construct
  misc_feature 1..99: note = Synthetic
  misc_feature 1..99: note = See specification as filed for detailed description of substitutions and modifications
  source 1..99: mol_type = other RNA
ccaagtgtcttccagtacgatttggttgtagctcccttcgaaagaccgttgctacaataaggccgaaagtgccgcaacgctctgccttctggcatcgtt

SEQ ID NO: 535 - RNA, 95 nt, synthetic construct
  misc_feature 1..95: note = Synthetic
  misc_feature 1..95: note = See specification as filed for detailed description of substitutions and modifications
  source 1..95: mol_type = other RNA
ccaagtgtcttccagtacgatttggttgtagctccctgaaaccgttgctacaataaggccgaaagtgccgcaacgctctgccttctggcatcgtt

We claim:

1. A polynucleotide comprising an open reading frame (ORF), the ORF comprising:
a nucleotide sequence encoding a C-terminal N. meningitidis (Nine) Cas9 polypeptide at least 90% identical to any one of SEQ ID NOs: 29, 32-41, 224-226, 231-233, 238-240, 245-247, 252-254, 259-261, 266-268, 273-275, 280-282, 287-289, 294-296, 301-303, or 316-321, wherein the Nine Cas9 is an Nme2 Cas9, an Nme1 Cas9, or Nme3 Cas9; and
a nucleotide sequence encoding a first nuclear localization signal (NLS).

2. The polynucleotide of claim 1, wherein the ORF further comprises a nucleotide sequence encoding a second NLS.

3. The polynucleotide of claim 1, wherein the first and second NLS are independently selected from SEQ ID NO: 388 and 410-422.

4. The polynucleotide of any one of claims 1-3, wherein the polynucleotide further comprises a poly-A sequence or a polyadenylation signal sequence.

5. The polynucleotide of claim 4, wherein the poly-A sequence comprises non-adenine nucleotides.

6. The polynucleotide of any one of claims 4-5, wherein the poly-A sequence comprises 100-400 nucleotides.

7. The polynucleotide of any one of claims 4-6, wherein the poly-A sequence comprises a sequence of SEQ ID NO: 409.

8. The polynucleotide of any one of claims 1-7, wherein the ORF further comprises a nucleotide sequence encoding a linker sequence between the first NLS and the second NLS.

9. The polynucleotide of any one of claims 1-8, wherein the ORF further comprises a nucleotide sequence encoding a linker spacer sequence between the Nine Cas9 coding sequence and the NLS proximal to the Nine Cas9 coding sequence.

10. The polynucleotide of any one of claims 8-9, wherein the linker comprises at least 1, at least 2, at least 3, at least 4, at least 5, at least 6, at least 7, at least 8, at least 9, or at least 10 amino acids.

11. The polynucleotide of any one of claims 8-10, wherein the linker sequence comprises GGG or GGGS, optionally wherein the GGG or GGGS sequence is at the N-terminus of the spacer sequence.

12. The polynucleotide of any one of claims 8-11, wherein the linker sequence comprises a sequence of any one of SEQ ID NOs: 61-122.

13. The polynucleotide of any one of claims 1-12, wherein the ORF further comprises one or more additional heterologous functional domains.

14. The polynucleotide of any one of claims 1-13, wherein the Nine Cas9 has double stranded endonuclease activity.

15. The polynucleotide of any one of claims 1-14, wherein the Nine Cas9 has nickase activity.

16. The polynucleotide of any one of claims 1-14, wherein the Nine Cas9 comprises a dCas9 DNA binding domain.

17. The polynucleotide of any one of claims 1-16, wherein the NmeCas9 comprises an amino acid sequence with at least 91%, 92%, 93%, 94%, 95%, 96%, 97%, 98%, or 99% to any one of SEQ ID NOs: 1 and 4-13, 220, 227, 234, 241, 248, 255, 262, 269, 276, 283, 290, 297, or 310-315.

18. The polynucleotide of any one of claims 1-17 wherein the NmeCas9 comprises an amino acid sequence of SEQ ID NO: 1 and 4-13, 220, 227, 234, 241, 248, 255, 262, 269, 276, 283, 290, 297, or 310-315.

19. The polynucleotide of any one of claims 1-18, wherein the sequence encoding the NmeCas9 comprises a nucleotide sequence having at least 91%, 92%, 93%, 94%, 95%, 96%, 97%, 98%, or 99% identity to the nucleotide sequence of any one of SEQ ID NOs: 15, 18-27, 29, 32-41, 221-226, 228-233, 235-240, 242-247, 249-254, 256-261, 263-268, 270-275, 277-282, 284-289, 291-296, 298-303, 304-309, or 316-321.

20. The polynucleotide of any one of claims 1-19, wherein the sequence encoding the NmeCas9 comprises a nucleotide sequence of any one of SEQ ID NOs: 15, 18-27, 29, 32-41, 221-226, 228-233, 235-240, 242-247, 249-254, 256-261, 263-268, 270-275, 277-282, 284-289, 291-296, 298-303, 304-309, or 316-321.

21. A polynucleotide comprising an open reading frame (ORF) encoding a polypeptide comprising:
a cytidine deaminase, which is optionally an APOBEC3A deaminase;
a nucleotide sequence encoding a C-terminal N. meningitidis (Nine) Cas9 nickase polypeptide at least 90% identical to any one of SEQ ID NOs: 1 and 4-13, 220, 227, 234, 241, 248, 255, 262, 269, 276, 283, 290, or 297, wherein the Nine Cas9 nickase is an Nme2 Cas9 nickase, an Nme1 Cas9 nickase, or an Nme3 Cas9 nickase; and
a nucleotide sequence encoding a first nuclear localization signal (NLS);
wherein the polypeptide does not comprise a uracil glycosylase inhibitor (UGI).

22. The polynucleotide of claim 21, wherein the ORF further comprises a nucleotide sequence encoding a second NLS.

23. The polynucleotide of any one of claims 21-22, wherein the deaminase is located N-terminal to an NLS in the polypeptide.

24. The polynucleotide of any one of claims 21-23, wherein the cytidine deaminase is located N-terminal to the first NLS and the second NLS in the polypeptide.

25. The polynucleotide of any one of claims 21-22, wherein the cytidine deaminase is located C-terminal to an NLS in the polypeptide.

26. The polynucleotide of any one of claims 23-25, wherein the cytidine deaminase is located C-terminal to the first NLS and the second NLS in the polypeptide.

27. The polynucleotide of any one of claims 21-26, wherein the ORF does not comprise a coding sequence for an NLS C-terminal to the ORF encoding the Nine Cas9.

28. The polynucleotide of any one of claims 21-26, wherein the ORF does not comprise a coding sequence C-terminal to the ORF encoding the Nine Cas9.

29. The polynucleotide of any one of claims 1-28, wherein the cytidine deaminase comprises an amino acid sequence with at least 87% identity to SEQ ID NOs: 151.

30. The polynucleotide of any one of claims 1-28, wherein the cytidine deaminase comprises an amino acid sequence with at least 80% identity to SEQ ID NOs: 152-216.

31. The polynucleotide of any one of claims 1-28, wherein the cytidine deaminase comprises an amino acid sequence with at least 80% identity to SEQ ID NO: 14.

32. The polynucleotide of any one of claims 1-31, the ORF comprises a nucleotide sequence at least 80% identical to SEQ ID NO: 42.

33. The polynucleotide of any one of claims 1-32, wherein the polynucleotide comprises a 5′ UTR with at least 90% identity to any one of SEQ ID NOs: 391-398.

34. The polynucleotide of any one of claims 1-33, wherein the polynucleotide comprises a 5′ UTR comprising any one of SEQ ID NOs: 391-398.

35. The polynucleotide of any one of claims 1-34, wherein the polynucleotide comprises a 3′ UTR with at least 90% identity to any one of SEQ ID NOs: 399-406.

36. The polynucleotide of any one of claims 1-35, wherein the polynucleotide comprises a 3′ UTR comprising any one of SEQ ID NOs: 399-306.

37. The polynucleotide of any one of claims 1-36, wherein the polynucleotide comprises a 5′ UTR and a 3′ UTR from the same source.

38. The polynucleotide of any one of claims 1-37, wherein the polynucleotide comprises a 5′ cap, optionally wherein the 5′ cap is Cap0, Cap1, or Cap2.

39. The polynucleotide of any one of claims 1-38, wherein at least 75%, 80%, 85%, 90%, 95%, 98%, 99%, or 100% of the codons of the ORF are minimal adenine codons or minimal uridine codons.

40. The polynucleotide of any one of claims 1-39, wherein the ORF comprises or consists of codons that increase translation of the mRNA in a mammal.

41. The polynucleotide of any one of claims 1-40, wherein the ORF comprises or consists of codons that increase translation of the mRNA in a human.

42. The polynucleotide of any one of claims 1-41, wherein the polynucleotide is an mRNA.

43. The polynucleotide of claim 42, wherein the ORF comprises a sequence having at least 90%, 95%, 98% or 100% identity to any one of SEQ ID NO: 29, 32-41, 224-226, 231-233, 238-240, 245-247, 252-254, 259-261, 266-268, 273-275, 280-282, 287-289, 294-296, 301-303, or 316-321.

44. The polynucleotide of any one of claims 42-43, wherein at least 10% of the uridine in the mRNA is substituted with a modified uridine.

45. The polynucleotide of any one of claims 42-43, wherein less than 10% of the uridine in the mRNA is substituted with a modified uridine.

46. The polynucleotide of claim 45, wherein the modified uridine is one or more of N1-methyl-pseudouridine, pseudouridine, 5-methoxyuridine, or 5-iodouridine.

47. The polynucleotide of claim 45, wherein the modified uridine is one or both of N1-methyl-pseudouridine or 5-methoxyuridine.

48. The polynucleotide of any one of claims 45-47, wherein the modified uridine is N1-methyl-pseudouridine.

49. The polynucleotide of any one of claims 45-47, wherein the modified uridine is 5-methoxyuridine.

50. The polynucleotide of any one of claims 44, and 46-49, wherein 15% to 45% of the uridine is substituted with the modified uridine.

51. The polynucleotide of claim 50, wherein at least 20% or at least 30% of the uridine is substituted with the modified uridine.

52. The polynucleotide of claim 51, wherein at least 80% or at least 90% of the uridine is substituted with the modified uridine.

53. The polynucleotide of claim 52, wherein 100% of the uridine is substituted with the modified uridine.

54. The polynucleotide of claim 42, wherein less than 10% of the nucleotides in the mRNA is substituted with a modified nucleotide.

55. A composition comprising the polynucleotide according to any one of claims 1-54, and at least one guide RNA (gRNA).

56. A composition comprising a first polynucleotide comprising a first open reading frame (ORF) encoding a polypeptide comprising a cytidine deaminase, optionally an APOBEC3A deaminase, and a NmeCas9 nickase, and a second polynucleotide comprising a second open reading frame encoding a uracil glycosylase inhibitor (UGI), wherein the second polynucleotide is different from the first polynucleotide, and optionally further comprising a guide RNA (gRNA).

57. The composition of claim 55 or 56, wherein the gRNA is a single guide RNA.

58. The composition of claim 55 or 56, wherein the gRNA is a dual guide RNA.

59. A composition comprising the polynucleotide according to any one of claims 1-57, further comprising a single guide RNA, wherein the single guide RNA comprises a guide region and a conserved region, wherein the conserved region comprising one or more of:
(a) a shortened repeat/anti-repeat region, wherein the shortened repeat/anti-repeat region lacks 2-24 nucleotides, wherein
(i) one or more of nucleotides 37-48 and 53-64 is deleted and optionally one or more of nucleotides 37-64 is substituted relative to SEQ ID NO: 500; and
(ii) nucleotide 36 is linked to nucleotide 65 by at least 2 nucleotides; or
(b) a shortened hairpin 1 region, wherein the shortened hairpin 1 lacks 2-10, optionally 2-8 nucleotides, wherein
(i) one or more of nucleotides 82-86 and 91-95 is deleted and optionally one or more of positions 82-96 is substituted relative to SEQ ID NO: 500; and
(ii) nucleotide 81 is linked to nucleotide 96 by at least 4 nucleotides; or
(c) a shortened hairpin 2 region, wherein the shortened hairpin 2 lacks 2-18, optionally 2-16 nucleotides, wherein
(i) one or more of nucleotides 113-121 and 126-134 is deleted and optionally one or more of nucleotides 113-134 is substituted relative to SEQ ID NO: 500; and
(ii) nucleotide 112 is linked to nucleotide 135 by at least 4 nucleotides;
wherein one or both nucleotides 144-145 are optionally deleted relative to SEQ ID NO: 500;
wherein at least 10 nucleotides are modified nucleotides.

60. A composition comprising the polynucleotide according to any one of claims 1-57, further comprising a single guide RNA, wherein the single guide RNA comprises a guide region and a conserved region, wherein the conserved region comprising one or more of:
(a) a shortened repeat/anti-repeat region, wherein the shortened repeat/anti-repeat region lacks 2-24 nucleotides, wherein
(i) one or more of nucleotides 37-64 is deleted and optionally substituted relative to SEQ ID NO: 500; and
(ii) nucleotide 36 is linked to nucleotide 65 by (i) a first internal linker that alone or in combination with nucleotides substitutes for 4 nucleotides, or (ii) at least 4 nucleotides; or
(b) a shortened hairpin 1 region, wherein the shortened hairpin 1 lacks 2-10, optionally 2-8 nucleotides, wherein
(i) one or more of nucleotides 82-95 is deleted and optionally substituted relative to SEQ ID NO: 500; and
(ii) nucleotide 81 is linked to nucleotide 96 by (i) a second internal linker that alone or in combination with nucleotides substitutes for 4 nucleotides, or (ii) at least 4 nucleotides; or
(c) a shortened hairpin 2 region, wherein the shortened hairpin 2 lacks 2-18, optionally 2-16 nucleotides, wherein
(i) one or more of nucleotides 113-134 is deleted and optionally substituted relative to SEQ ID NO: 500; and
(ii) nucleotide 112 is linked to nucleotide 135 by (i) a third internal linker that alone or in combination with nucleotides substitutes for 4 nucleotides, or (ii) at least 4 nucleotides;
wherein one or both nucleotides 144-145 are optionally deleted as compared to SEQ ID NO: 500;
wherein the gRNA comprises at least one of the first internal linker, the second internal linker, and the third internal linker.

61. A polypeptide encoded by the polynucleotide of any one of claims 1-60.

62. A vector comprising the polynucleotide of any one of claims 1-60.

63. An expression construct comprising a promoter operably linked to a sequence encoding the polynucleotide of any one of claims 1-60.

64. The expression construct of claim 63, wherein the promoter is an RNA polymerase promoter, optionally a bacterial RNA polymerase promoter.

65. The expression construct of claim 63 or 64, further comprising poly-A tail sequence or a polyadenylation signal sequence.

66. The expression construct of claim 65, wherein the poly-A tail sequence is an encoded poly-A tail sequence.

67. A plasmid comprising the expression construct of any one of claims 63-66.

68. A host cell comprising the vector of claim 62, the expression construct of any one of claims 63-66, or the plasmid of claim 67.

69. A pharmaceutical composition comprising the polynucleotide, composition, or polypeptide of any of claims 1-61 and a pharmaceutically acceptable carrier.

70. A kit comprising the polynucleotide, composition, or polypeptide of any of claims 1-61.

71. Use of the polynucleotide, composition, or polypeptide of any one of claims 1-61 for modifying a target gene in a cell.

72. Use of the polynucleotide, composition, or polypeptide of any one of claims 1-61 for the manufacture of a medicament for modifying a target gene in a cell.

73. The polynucleotide or composition of any one of claims 1-60, wherein the polynucleotide or composition is formulated as a lipid nucleic acid assembly composition, optionally a lipid nanoparticle.

74. A method of modifying a target gene comprising delivering to a cell the polynucleotide, polypeptide, or composition of any one of claims 1-61.

75. A method of modifying a target gene, comprising delivering to the cell one or more lipid nucleic acid assembly compositions, optionally lipid nanoparticles, comprising the polynucleotide according to any one of claims 1-60, and one or more guide RNAs.

76. The method of any one of claims 74-75, wherein at least one lipid nucleic acid assembly composition comprises lipid nanoparticle (LNPs), optionally wherein all lipid nucleic acid assembly compositions comprise LNPs.

77. The method of any one of claims 74-75, wherein at least one lipid nucleic acid assembly composition is a lipoplex composition.

78. The composition or method of any one of claims 75-77, wherein the lipid nucleic acid assembly composition comprises an ionizable lipid.

79. A method of producing a polynucleotide of any one of claims 1-54, comprising contacting the expression construct of claims 63-66 with an RNA polymerase and NTPs that comprise at least one modified nucleotide.

80. The method of claim 79, wherein NTPs comprise one modified nucleotide.

81. The method of claim 79 or 80 wherein the modified nucleotide comprises a modified uridine.

82. The method of claim 81, wherein at least 80% or at least 90% or 100% of the uridine positions are modified uridines.

83. The method of claim 81 or 82, wherein the modified uridine comprises or is a substituted uridine, pseudouridine, or a substituted pseudouridine, optionally N1-methyl-psuedouridine.

84. The method of any one of claims 79-83, wherein the expression construct comprises an encoded poly-A tail sequence.
